United States Patent Application Publication US 2005/0287559 A1 - sequence listing, part 3

SEQ ID NO: 9052 - DNA, 201 bp, Homo sapiens
agagcaatctgcagagagaacgcaagcatggagatctcctaggaaggaatgctgtggcaggagatggacaagaatctgccatcgaggaaggttaaaagtasggctggcttgagggtagttaattgagtggtacatgtactgaaggtcattaattactaaagttaattttgaggcagagcctggggaagttgaagttcaaat

SEQ ID NO: 9053 - DNA, 201 bp, Homo sapiens
acacaacatacataaccagagagagttttaacagaggttataatccaagtctaaattgcacccaaaaacaacagatttctaaaattatctttaaatgcccmataaaagaacccgggaaaccactgcttacactgcaatttcgttcacctggctaatttcagtgatactaaaaaccccaagtgatcactcttactcttctct

SEQ ID NO: 9054 - DNA, 201 bp, Homo sapiens
atatagtgtcagtatttcaaacaaataagagaaaccaatattcagaccctaaagttaataaaatatgtcttaagacttgtgaaaatcaaattatttgcttyctaatcaccaagaaaaaaatatagaaaaaaataccacctcttcacaaaggagttaggagtgcagtatgaaaattataatattggtaaggctacaaagatc

SEQ ID NO: 9055 - DNA, 201 bp, Homo sapiens
ttgattatgcttaacttttaatttgttgcaggttaaagcaaataccaagggctgtatttcttagcctctttagtaggaaatgagattatgatgtcagttcrataaaattccaacagaccaggcaatgaagtaaatatgttcacaatgaatgccacgtcatcataaagtgatggaattataaccagccctttgcaccttaat

SEQ ID NO: 9056 - DNA, 201 bp, Homo sapiens
tatcaactttctgagttttagccctcagttcaacaaagcatgaatagcctagtattgtgccaggtactggttatacaaagaaaaataaatttttagtcttyagctctctgagagtttgtatgttagaaaactaaagccttcctgatttaatattgtttagaatattgcccatatcccatcaaatcactctgaggacaagaa

SEQ ID NO: 9057 - DNA, 201 bp, Homo sapiens
cataatgaacataaacctacatatcttttctttccccaagtacgtgctcacggggagcaacagtccaccctatgaataaatggaattgtatttgaagtaaytacacttggcatagatttacccactgctggtggcagggctgctacttgtgactaagcagtgaggggaactcaacagaattgatggcaaacggctttaatt

SEQ ID NO: 9058 - DNA, 201 bp, Homo sapiens
gggaggggaggagaagagaggggaggggaagggaggggaggggaggccaaaccttcaataaccgacatcaaaaggtcagggctgggagtggtgtctaacgyttgtaatcccaccactttgggaggtcaaggtgggtggatcacctggggtcaggagtttgagaccagcctggccaacatgatgaaaccccgtctctactaa

SEQ ID NO: 9059 - DNA, 201 bp, Homo sapiens
tgtggtttaatatttaaagttttggctgtttgtcccaacttctatattatgatttattagataatgtcgattatttaactttgaagcagaaacttatttcrcttttaatcatttggatcagattgatggatgagcatcttgtggttgcaaggcaagctgttaaaaaaaaaagttattatttgccactacttatcaccacaa

SEQ ID NO: 9060 - DNA, 201 bp, Homo sapiens
atgtgctttttcatgcaactcttgatagacagaaagaaaagaaagaggggaagaaaatggtggaagagtgagggacggagaaggagaagggagggtaggaycgaaacttcgataagggcagctatagtagaaaacgtaacagcttcccaaggagattcctttgggagagggaatatataatgtgtaattttggtttatttt

SEQ ID NO: 9061 - DNA, 201 bp, Homo sapiens
gtatgagaaactaaaaggtacaaataagttttaagcccttatttgatgatatcaacaatgctatcaatggaaaaataaaaggactacactatactctaacmcagatggctgataaaatttatgactaatttattaaaccactcattataccagatagattatttgaagtcttacaaatctaatgtaactttccaaataact

SEQ ID NO: 9062 - DNA, 201 bp, Homo sapiens
ttttatttccaaccttacttatgtctgtaacatcctaatttttttacgtgaacagaataataattagtgctatttgttaatccgggcactatgtatcacayacgatattcatcatgagccaaaatatttactttagtgcctgtggcaggcaatataattttcaatgatgcatacatttgctgatcgactgggaaattcctg

SEQ ID NO: 9063 - DNA, 201 bp, Homo sapiens
actaattctctgttgcttcaactcttgcccaacacagcagccagagggttcatctgctcccaaaccccccagccttcccaaacatgccaagttcacgcctkcttcacggttttggcaatggcttgcttccctattaccataggcctcttcccaaatgtcatctcaacagagagttcttccctctgtacccaactccatgcc

SEQ ID NO: 9064 - DNA, 201 bp, Homo sapiens
tggttatttttaaagcaagtagacaattagatatcttaataaaataactttcttataattagctaatcactactgttaatgctttaaatttattattatcrtagttgaaggcataattttattaaacaaaaattgaatgaaataagccatgtagtagaaataaccagaaacaggaggcactttatctcaatatctaagcat

SEQ ID NO: 9065 - DNA, 201 bp, Homo sapiens
tggggtcaggagtttgagaccagcctggccaacatgatgaaaccccgtctctactaaaaatacaaaaatcatctggatgtggtgtcgggtgcctgtaatcycagctacttgggaggctgaggcaggagaatcgcttgaacccaggaagcagaggttgcagtaagctgagatcacacccctgcactccagcctgggcaacag

SEQ ID NO: 9066 - DNA, 201 bp, Homo sapiens
gaaaatactttaagacttaacattttaattttaatccactgttgactttggaaaaagatgtcaggttcacaattccacagtcagatctacgtggggaacgygacctggagggcaggaggggaaagcactgccagccttccactccagtgttaggaccctgagtaaaagccctaaacccaggaaaatccaaaagagaggacc

SEQ ID NO: 9067 - DNA, 201 bp, Homo sapiens
ttattgattagggaactcaaacagcctttgctatttgccagacaaaaagctaaataccccctttcataaatcttgagaaaaggccaaagaaaaatgaaaastagtgtattctggaaagagaacaagccaagacaagattataaccaagtcaaagctgagaaccaagtaacaaacgtatctccagaatagagcttgaaaaac

SEQ ID NO: 9068 - DNA, 201 bp, Homo sapiens
aaaaaaaagtatgctatcacctcatcagttgtgaatttttacactttctactatttgaatttgctatttcaattttttgttaccacaccagaaaaagattyttttcttttctttttaagaaagaacaattttagacacaaaaaatgcttctaccattttcctgcataggaagaattttatggcttctcactgtaactaaca

SEQ ID NO: 9069 - DNA, 201 bp, Homo sapiens
tgaaggaatggtcaaattcaataatcaacaagtatttatttagtatctactatatagagggtattgttttacttataaagctagaaatgtcacaaagctgktttatttcttctgtgacatttgatcttatggcacaattatacatttatagataaggtgtaatactcaccagttaactaaatcacatttacgccagatctg

SEQ ID NO: 9070 - DNA, 201 bp, Homo sapiens
tatagataaggtgtaatactcaccagttaactaaatcacatttacgccagatctgctgtggcaattttagaaatactgagtccactccagggcaattagastattcccagctatatcatatctcacctattgcatatctgttgtatctcgccagctacatataggtctcagtgacaggattttgtatgtacagacaactaa

SEQ ID NO: 9071 - DNA, 201 bp, Homo sapiens
ggtagaggttgcagtgagctgagatcgcgccgctgcactccagcctgggcaacagagcaagactccgtctcataaataaataaataaataaataaataaawttaatgaaaatactagccaaataaacagatacgagcaaccatggtcatatgggcataacacaacactggtttaactactatgttcccaaagtttgcaaca

SEQ ID NO: 9072 - DNA, 201 bp, Homo sapiens
gctaataaagaattgacaatggcacaaggtaagagagagaagcaagcaggggcagacctaggagagacccacttgattgtgcccatgtctttagttattgkctcgttctcagtctctttttggacatataccataactcaattctaccatgggattagttaaactgacttctaagttggacagttttaaatcttagtttta

SEQ ID NO: 9073 - DNA, 201 bp, Homo sapiens
actttattgtaagaatacagtatgtaatacatataacatacaaaatatgtgttaatctactctgctattggtaaggcttccggtcaatagatgactattastagttcagtttttagggagccaaaagttatatacagattttcaactgcacaagggatcagtgttcctaacgctcaggtcattcaagggtcataagaaact

SEQ ID NO: 9074 - DNA, 201 bp, Homo sapiens
agcttgagaccagcctggccaacatgtgacaccccatctctattaaaaaacacagaaattggccaggcacggtggtgtgcacctgtaagcccagctaatcrggaggctgaggcaggagaatcgcttgaacccaggaggcagaggttgcagtgagccaagatcgcgccactgcactccagcctgggtgacagtgcgagactc

SEQ ID NO: 9075 - DNA, 201 bp, Homo sapiens
ccaggcacggtggtgtgcacctgtaagcccagctaatcgggaggctgaggcaggagaatcgcttgaacccaggaggcagaggttgcagtgagccaagatcrcgccactgcactccagcctgggtgacagtgcgagactctgtctcaaaaaaaaaaaaaaaaaaaaaagtacaggaacacactgaaactcagaacaatttgc

SEQ ID NO: 9076 - DNA, 201 bp, Homo sapiens
tcaaatttacccaaaataaaaccagtgagaggtatagccagaattaaactcagcccaacttcagagcctgcattcttacagaaaatacacacacacacacmcccacacacacacacacacacacacaaatatacagataccattaaaataagtggcatgggggtagaactttgtcttatataccattgtaatccccacatt

SEQ ID NO: 9077 - DNA, 201 bp, Homo sapiens
atttacccaaaataaaaccagtgagaggtatagccagaattaaactcagcccaacttcagagcctgcattcttacagaaaatacacacacacacacacccmcacacacacacacacacacacaaatatacagataccattaaaataagtggcatgggggtagaactttgtcttatataccattgtaatccccacattaaat

SEQ ID NO: 9078 - DNA, 201 bp, Homo sapiens
cattcagacagacatataataggtaacattactgctggatcagaaaataatttagcctctgaaacacagtctgatcgagtgatggtaagtatgggtgactscagatgccgactgcctgcgttcaaattccagctcctctgctttctggctatgtggctataagcaagtgacctctgtgtttcagctacttcatctacaaag

SEQ ID NO: 9079 - DNA, 201 bp, Homo sapiens
tggtctcaaactcctgacctcaggtgatctgcccacctcagcctcccaaagtgctgggattgcaggcgtgagccaccaggcccagccacatgatttcttgkatcatgtattttaaacatgatgctacccacaaactcctgtttgtttcagaactcttccctcctccttttttctgctttttcttttgcctttttcttgctg

SEQ ID NO: 9080 - DNA, 201 bp, Homo sapiens
ataaagtattgtgttaaaacttgcagcaatatatttcatagggtacaccaaatacactaaaatcttaaaatcaggggcatgcaaagaaattcagccacccrgcatccgttccccctccttatggaatgctcatcatgatttcctgctggggaactatttcctcaccacacacagttttagaaacatccagttctccccttg

SEQ ID NO: 9081 - DNA, 201 bp, Homo sapiens
ccttcttcttaaatattttctcctactgcactgaaaaatacatttatatttgaaaagtattctgattttagttcataagttaatgttcctatatccatggstcctgcacccactctctctcagaaattcacaaccaaaactacctaggaggaaattacacaacaccacaaagtatccttgtcttcctctactgaaatgacc

SEQ ID NO: 9082 - DNA, 201 bp, Homo sapiens
tcttaaatattttctcctactgcactgaaaaatacatttatatttgaaaagtattctgattttagttcataagttaatgttcctatatccatggctcctgsacccactctctctcagaaattcacaaccaaaactacctaggaggaaattacacaacaccacaaagtatccttgtcttcctctactgaaatgacctatggc

SEQ ID NO: 9083 - DNA, 201 bp, Homo sapiens
tttctcctactgcactgaaaaatacatttatatttgaaaagtattctgattttagttcataagttaatgttcctatatccatggctcctgcacccactctytctcagaaattcacaaccaaaactacctaggaggaaattacacaacaccacaaagtatccttgtcttcctctactgaaatgacctatggccacttctttg

SEQ ID NO: 9084 - DNA, 201 bp, Homo sapiens
tctcctactgcactgaaaaatacatttatatttgaaaagtattctgattttagttcataagttaatgttcctatatccatggctcctgcacccactctctytcagaaattcacaaccaaaactacctaggaggaaattacacaacaccacaaagtatccttgtcttcctctactgaaatgacctatggccacttctttgtc

SEQ ID NO: 9085 - DNA, 201 bp, Homo sapiens
attctgattttagttcataagttaatgttcctatatccatggctcctgcacccactctctctcagaaattcacaaccaaaactacctaggaggaaattacmcaacaccacaaagtatccttgtcttcctctactgaaatgacctatggccacttctttgtctaacttgaactgaatatttagaggcatcttaaaccgagat

SEQ ID NO: 9086 - DNA, 201 bp, Homo sapiens
tttagttcataagttaatgttcctatatccatggctcctgcacccactctctctcagaaattcacaaccaaaactacctaggaggaaattacacaacaccmcaaagtatccttgtcttcctctactgaaatgacctatggccacttctttgtctaacttgaactgaatatttagaggcatcttaaaccgagatcatcagct

SEQ ID NO: 9087 - DNA, 201 bp, Homo sapiens
agagagagagggagaaagaaagaaatgaagagaaggaaggaagggagggagggagggagggggggagaggaagaggaaagaaaagaataaaaagaacactrtacagggaatcagggaatagaggaaaaactatttaatgtctaatcccaccatggccatcaacaatctaggggaactttgggaaaggtattaacctctctg

SEQ ID NO: 9088 - DNA, 201 bp, Homo sapiens
aaagatgactaggataaatctcaagagttagaaataaacatgtttattatccatttgtggcaccatttagttggcagacaaataaacctgatttaaaccakgcacacagagaatataggtatattcagctgacagttaccttcaccatcctataaggagaatgtatcttaagagtgccttcaaaacaaatggcatctgtct

SEQ ID NO: 9089 - DNA, 201 bp, Homo sapiens
ttttttcaatgttcagtttcctttaatgacccccatctccctgaagggcaggtgcaggcagctaggtgatggcaagagatgttcacttgaagatcttgccstgattgaaggctttgcccacatgctggaaggccccctcccaggaaaagtactctcgaaccagcgtctgggtctcctctctgccaggatccagtttccgcc

SEQ ID NO: 9090 - DNA, 201 bp, Homo sapiens; identical to SEQ ID NO: 9089

SEQ ID NO: 9091 - DNA, 201 bp, Homo sapiens
atgttcacttgaagatcttgccgtgattgaaggctttgcccacatgctggaaggccccctcccaggaaaagtactctcgaaccagcgtctgggtctcctckctgccaggatccagtttccgccatgtgtatgactcgtagtccacctgccaatctggactcagcggaaaggcaagctcctggcctcggaagacccagactc

SEQ ID NO: 9092 - DNA, 201 bp, Homo sapiens; identical to SEQ ID NO: 9091

SEQ ID NO: 9093 - DNA, 201 bp, Homo sapiens
agcatcaaactgggccatcttctcacacagtttcagttcccccaagacagcccggaactggggctggttaatgcaggtgaggaaccagcggttggtattgsgaaaggcccggcggaaagaaggctctagaacctgcttatagagccacaacagggtgcagacaactgtgatgtcagccaatgtcactcgttcgcccaccag

SEQ ID NO: 9094 - DNA, 201 bp, Homo sapiens; identical to SEQ ID NO: 9093

SEQ ID NO: 9095 - DNA, 201 bp, Homo sapiens
ctgggccatcttctcacacagtttcagttcccccaagacagcccggaactggggctggttaatgcaggtgaggaaccagcggttggtattgcgaaaggccyggcggaaagaaggctctagaacctgcttatagagccacaacagggtgcagacaactgtgatgtcagccaatgtcactcgttcgcccaccagaaaagtcct

SEQ ID NO: 9096 - DNA, 201 bp, Homo sapiens; identical to SEQ ID NO: 9095

SEQ ID NO: 9097 - DNA, 201 bp, Homo sapiens
gctcctcattgctcacatagtaggcaatggcgttgctctcaaacacacagaatccatcatcaccctcaaatgctgggaccttgccggcaggaaatttgcgragaaattcagaggtgcggttggtttggccaaaatggaagtggggtggtgcggagagcacgcggatctgagccccgctgtactgagcagcgatgagagcct

SEQ ID NO: 9098 - DNA, 201 bp, Homo sapiens; identical to SEQ ID NO: 9097

SEQ ID NO: 9099 - DNA, 201 bp, Homo sapiens
ctcacatagtaggcaatggcgttgctctcaaacacacagaatccatcatcaccctcaaatgctgggaccttgccggcaggaaatttgcgaagaaattcagrggtgcggttggtttggccaaaatggaagtggggtggtgcggagagcacgcggatctgagccccgctgtactgagcagcgatgagagccttgaaggccctc

SEQ ID NO: 9100 - DNA, 201 bp, Homo sapiens; identical to SEQ ID NO: 9099

SEQ ID NO: 9101 - DNA, 201 bp, Homo sapiens
tcaaatgctgggaccttgccggcaggaaatttgcgaagaaattcagaggtgcggttggtttggccaaaatggaagtggggtggtgcggagagcacgcggayctgagccccgctgtactgagcagcgatgagagccttgaaggccctccagttttcaggatacgtgtacagggtcccagccgccatggtgattccgcaaaga

SEQ ID NO: 9102 - DNA, 201 bp, Homo sapiens; identical to SEQ ID NO: 9101

SEQ ID NO: 9103 - DNA, 201 bp, Homo sapiens
acctttgttcacttatctgctgaccttccctccactattgtcctgtgaccctgccaaatccccctctgcgagaaacacccaagaatgatcaataaaaaaargaaaaagaaaaagaaaaaagaaaaaaaaaaaaaagaaaatacaacttctatatgagtgctggattgctaagaaaggaaaggcttacctatagactctaat

SEQ ID NO: 9104 - DNA, 201 bp, Homo sapiens
cctttgttcacttatctgctgaccttccctccactattgtcctgtgaccctgccaaatccccctctgcgagaaacacccaagaatgatcaataaaaaaaaraaaaagaaaaagaaaaaagaaaaaaaaaaaaaagaaaatacaacttctatatgagtgctggattgctaagaaaggaaaggcttacctatagactctaatg

SEQ ID NO: 9105 - DNA, 201 bp, Homo sapiens
atcacaaagaaatacatacatatagcccagcacagtggctcacacctgtaatcccagcactttcggaggctgaggcaggcggatcacctgaggtcaggagwtcgagaccggcctggccaacatggtgaaaccacacctctactaaaagtacaaaaattagccaggcgtggtggtgcacacctgtagtctcagctactaggg

SEQ ID NO: 9106 - DNA, 201 bp, Homo sapiens
caaagaaatacatacatatagcccagcacagtggctcacacctgtaatcccagcactttcggaggctgaggcaggcggatcacctgaggtcaggagttcgmgaccggcctggccaacatggtgaaaccacacctctactaaaagtacaaaaattagccaggcgtggtggtgcacacctgtagtctcagctactagggaggc

SEQ ID NO: 9107 - DNA, 201 bp, Homo sapiens
acctgaggtcaggagttcgagaccggcctggccaacatggtgaaaccacacctctactaaaagtacaaaaattagccaggcgtggtggtgcacacctgtastctcagctactagggaggctgaggcaggagaattgctcaaacccgggaagcagaggtcgcagtgagccgagaacacgccactgcactccagcctggcgac

SEQ ID NO: 9108 - DNA, 201 bp, Homo sapiens
atctgctgaccttccctccactattgtcctgtgaccctgccaaatccccctctgcgagaaacacccaagaatgatcaataaaaaaaagaaaaagaaaaagraaaaagaaaaaaaaaaaaaagaaaatacaacttctatatgagtgctggattgctaagaaaggaaaggcttacctatagactctaatgcgatttgaggaaa

SEQ ID NO: 9109 - DNA, 201 bp, Homo sapiens
agaccggcctggccaacatggtgaaaccacacctctactaaaagtacaaaaattagccaggcgtggtggtgcacacctgtagtctcagctactagggaggstgaggcaggagaattgctcaaacccgggaagcagaggtcgcagtgagccgagaacacgccactgcactccagcctggcgacagagcgagagactgtctca

SEQ ID NO: 9110 - DNA, 201 bp, Homo sapiens
cctggccaacatggtgaaaccacacctctactaaaagtacaaaaattagccaggcgtggtggtgcacacctgtagtctcagctactagggaggctgaggcwggagaattgctcaaacccgggaagcagaggtcgcagtgagccgagaacacgccactgcactccagcctggcgacagagcgagagactgtctcagaaaaaa

SEQ ID NO: 9111 - DNA, 201 bp, Homo sapiens
tgaccttccctccactattgtcctgtgaccctgccaaatccccctctgcgagaaacacccaagaatgatcaataaaaaaaagaaaaagaaaaagaaaaaaraaaaaaaaaaaaaagaaaatacaacttctatatgagtgctggattgctaagaaaggaaaggcttacctatagactctaatgcgatttgaggaaaagtcaa

SEQ ID NO: 9112 - DNA, 201 bp, Homo sapiens
gaccttccctccactattgtcctgtgaccctgccaaatccccctctgcgagaaacacccaagaatgatcaataaaaaaaagaaaaagaaaaagaaaaaagraaaaaaaaaaaaagaaaatacaacttctatatgagtgctggattgctaagaaaggaaaggcttacctatagactctaatgcgatttgaggaaaagtcaag

SEQ ID NO: 9113 - DNA, 201 bp, Homo sapiens
tccatgctgataaatcaagagtaactaaaatccaaacaggaattcagacaggtgagaaaatgaagtctttgtaaccaaaatactccagcataactcagctstatatggaaaagaacttgcatgtcagagttgccaacattttccgcacttgaagtcttgactatgcctttttccactgtcatctgggaagccaaggaaaat

SEQ ID NO: 9114 - DNA, 201 bp, Homo sapiens
cctgtgaccctgccaaatccccctctgcgagaaacacccaagaatgatcaataaaaaaaagaaaaagaaaaagaaaaaagaaaaaaaaaaaaaagaaaatwcaacttctatatgagtgctggattgctaagaaaggaaaggcttacctatagactctaatgcgatttgaggaaaagtcaagtctccattatgtgatagatt

SEQ ID NO: 9115 - DNA, 201 bp, Homo sapiens
ttataccatttatatcaagataaaatttaacttgttgcagcctttaattatgaaaaaaatttaaatatgacactatattgtatttcatttgtggaccaacyatattttttaatgtggacaaaactgacttaactgttacagtttcaaaaatagacaaaatcgactggacacggtggctcacacctgtaatcccagcacttt

SEQ ID NO: 9116 - DNA, 201 bp, Homo sapiens
cactgcatgatgcggggttaggggagcatggcaaccctgctgagcggtaaatgtgctcagtcgtttttttcccctctacctaaagcttttcctgtcaacascatccgagttacttagtatctctggagcaactcagacagaggggcttaacagtttagaagaaacagcttatgattccccacctaagagaggaaataaaat

SEQ ID NO: 9117 - DNA, 201 bp, Homo sapiens
cttatgattccccacctaagagaggaaataaaatgcatttaagtgaatgcctcccatttaattaacaaaagaaagagtagaactagattttaggtaaggayggaagcaactacaatacacttaagctgtcaggcctgacaactgacgaagaggttcagactcacccagtgaaaagcaataaaacaaaccttttcaggctta

SEQ ID NO: 9118 - DNA, 201 bp, Homo sapiens
ccacagtacctgtgatttgtcaccaatagaaatcacacattttcataacacattacaatagtttcagacattccaaatattcatgctcatcactactttgmaataatagtagttaatacacccaacaccaggtcattttatttaatgtgctagtaagtcagtgtatattacaaacttgggtttttttaattatatataatt

SEQ ID NO: 9119 - DNA, 201 bp, Homo sapiens
aaatggcaaaagccctttgaacactaaatatacaccacatgagctcactctctctctctctcctctattcagtggtgatttaactaccacctttccatttyccatgtgaagaactggggttcatttcctctgtagccctatttctgaaagcatgcaatcacattacatcactgccagtaaagcacagatggtgatttcagt

SEQ ID NO: 9120 - DNA, 201 bp, Homo sapiens
agtcctataatcaatcatgaacaatttttaaaatcaccatttttaacaagttttatgtcatcacttttgtaaatgtcatttttgcaaaaaagatgaacacrggttatgaaatagtgcctatgtcagtagaggtatgtttaataggacaggaaaaaataattagaggaaaaatttattatttgtatgtttatcaagcttgag

SEQ ID NO: 9121 - DNA, 201 bp, Homo sapiens
agggccaattacggacaaacaaaaatgcttatggggctgcttctttacttaactgaagatgaaaatggttttatttagtactatggtggaaaatacatatwcttaccactcggatttgtttattggatataaaaatatcaataagaaaaccagcactatatctttacgaataaaaatgttactaatatctgggtatatctg

SEQ ID NO: 9122 - DNA, 201 bp, Homo sapiens
aaggaacatatttagacatgttttagagatggagttgacaagactagctaacagtctgatgtaaggtgtaaggaaaaaagaaaacaaggatgaatccccarttggggacctgactacctgtgccatttagtgggaaagacagagaagaaaagcaagtctgggggtgaaaataaaggttgatttgggatatgtcaagttgag

SEQ ID NO: 9123 - DNA, 201 bp, Homo sapiens
gtatacagaaaacacaatgggcagcacatgtagccaggctttgaaggcagggctggaacagaggattagggaagatttacaaggtaaggaggagtaaaagmtaggaagagatgcagtaggatgaaagtgctcctgggtgagaaaaatcacattaaagtacagatgaaaaccagaatttgccaccgttagacatccaagtgg

SEQ ID NO: 9124 - DNA, 201 bp, Homo sapiens
ctaccgtacagatagacctaaaaatcattaagctaagtgaaagaagcaaacacaagggccacatattgaatgattctatttatatgaaacacccagaaaargcatccctatagagtagattaagtagttgcctagagctggggtgggaatagggattaactgtaaacaggcacaagagatcttattggggtgataaaaata

SEQ ID NO: 9125 - DNA, 201 bp, Homo sapiens
acagtgaacattctctggtagaagtcaccaatgaccaaataaataacttttgatatttatgtaaataaatattttatatttataaaatgccttatttatayggcttccctttagcatctaacacctctggccactcccgtcttctggaaagccctcccttggcttttctgacatcctgctgtcctggttctcctaggactc

SEQ ID NO: 9126 - DNA, 201 bp, Homo sapiens
caaccacagggacttttttaattcattttggttcatttttatcaactgggtctgagcttgtactgactcgttctctgtaaggtgcatgaggaccaggcctrcagctattgcaagcagcagctgcctaagtcctggtatgggtatagaaggtgcttatttttctctatctatgctctctaggtagtaggagtagaatgtctc

SEQ ID NO: 9127 - DNA, 201 bp, Homo sapiens
gcaacacagggagactccaactcaaaaaaacctcataattgccaacatatttatattaagggaatgaacccaagtcattatatgaaaaaaataaaggaagmtgaaattatagatgctccttggtttacaacggattttgctgaaggtaatgccagaagctgagtttactgaacgcttgtcacttccacaccactgtcaaaa

SEQ ID NO: 9128 - DNA, 201 bp, Homo sapiens
aacacagggagactccaactcaaaaaaacctcataattgccaacatatttatattaagggaatgaacccaagtcattatatgaaaaaaataaaggaagatsaaattatagatgctccttggtttacaacggattttgctgaaggtaatgccagaagctgagtttactgaacgcttgtcacttccacaccactgtcaaaaaa

SEQ ID NO: 9129 - DNA, 201 bp, Homo sapiens
actccaactcaaaaaaacctcataattgccaacatatttatattaagggaatgaacccaagtcattatatgaaaaaaataaaggaagatgaaattatagawgctccttggtttacaacggattttgctgaaggtaatgccagaagctgagtttactgaacgcttgtcacttccacaccactgtcaaaaaatcctaagtcga

SEQ ID NO: 9130 - DNA, 201 bp, Homo sapiens
tcaaaaaaacctcataattgccaacatatttatattaagggaatgaacccaagtcattatatgaaaaaaataaaggaagatgaaattatagatgctccttkgtttacaacggattttgctgaaggtaatgccagaagctgagtttactgaacgcttgtcacttccacaccactgtcaaaaaatcctaagtcgaaccatcct

SEQ ID NO: 9131 - DNA, 201 bp, Homo sapiens
caaaaaaacctcataattgccaacatatttatattaagggaatgaacccaagtcattatatgaaaaaaataaaggaagatgaaattatagatgctccttgktttacaacggattttgctgaaggtaatgccagaagctgagtttactgaacgcttgtcacttccacaccactgtcaaaaaatcctaagtcgaaccatccta

SEQ ID NO: 9132 - DNA, 201 bp, Homo sapiens
taatagaatacctatccctgctgtcacagttattccatccaaccttatctaatacttgatatgaatctctgtgctgtggccacattctctttcgattttgkttgctgttagcactgtgtctgtactaaagcacgagaatatggatttatacatttttttctaaccaatgtcttctcactcaaaacttattttgctttgtct

SEQ ID NO: 9133 - DNA, 201 bp, Homo sapiens
taactgaaacacaataactcaaagaatacagcctcagatattttattacaaaatgtagtactaccattaattagcatgatataaagaaatactggtcacakaccaaaaactgagttcgacagtctgagtttctatgaagaaaagtttaataaattattctcaaggtaacagtttcagaagaaaaagtttttaaacatttta

SEQ ID NO: 9134 - DNA, 201 bp, Homo sapiens
tgaagtaacctgaaattgaagtgcatttaaaagcactttttgtgaatctaatgtgcaggccatagtgtgaagctgcggaattggccggcaggagacagagygtaaaacctaggacttgctcttaaggtgtctacaataacatacaattccaactcatcctaacaaaaggcatcaggcctatgtgctccttcattttctcac

SEQ ID NO: 9135 - DNA, 201 bp, Homo sapiens
aaccccaacaaggccgggcgcagtagctcacgcctgtaatcctagcactttgggaggccaaagtgggcagatcacttgagcccagaagcttgaaatcagcytgggcaacacaatgaaacccaatctctaccaaaaacaaaaacattagctgggcatggtggtgtgtgcctgtagtctcagttactcgagacgctgaggtgg

SEQ ID NO: 9136 - DNA, 201 bp, Homo sapiens
gtacagtctatcattccctttatggtgaccccattggtcccgtattcacttttcttgccatgcatgtgacactgactacaccatagtctaatacaatttarcaacctacatttactagaatgtaaattccaaggactgtgacttattttctttgttacctcagctattagacatcggaaccctacagaagtcatgtaatac

SEQ ID NO: 9137 - DNA, 201 bp, Homo sapiens
gaagaaagtgggcagtgaagaagaaatggaggtggcaggatgaggtcaattccatatcctttagagtgcctgtgagatactaggcactgtgggacaagacmaagagactgagtcaggcagacctatctagcccattaagaactgctttaaagggacacatctggcaacagtaaaatacaaaagggaaggattacatctggc

SEQ ID NO: 9138 - DNA, 201 bp, Homo sapiens
actaggcactgtgggacaagacaaagagactgagtcaggcagacctatctagcccattaagaactgctttaaagggacacatctggcaacagtaaaatacmaaagggaaggattacatctggctggagatgactaggaaaagttttagatgagataatggaatttcactagggtcttcaagaatggaaagggcttaggcag

SEQ ID NO: 9139 - DNA, 201 bp, Homo sapiens
aaggcattctagacagacaagtaaatgaaggaaaggcagcaaaagaagagagaagaaaaggctagagctggaggcagtgacatctctaacagacttttttkttttttaagattcacatggaaatttacatacagattaaagagccaaaacactttcatcaaggacacattctgcaagcagaccatgacattcccatcaagt

SEQ ID NO: 9140 - DNA, 201 bp, Homo sapiens
gcccaagtcctttcttgctctccaaaacagacgtgcagtaaaatgaatggttaatgagtaatggaaaatggaataagagtttatggatgctagacagcaakgattacttattctgcatgagctcatgatttcacaagtttaatttaaaatcatataccatgtatatgctaacatacacataaatatatatatatatatata

SEQ ID NO: 9141 - DNA, 201 bp, Homo sapiens
ggagttggataggtggccaaagagttatgaaggagattgacttttgcatataatatttacattttctatcatgtgcatatattgcttatcaagaaataatrttcaaaaatatacggcattttatttatatatattgtatcctccgagaaattgctgtaatgaagtttgcttttccctctagatgcctgggcaccacaattc

SEQ ID NO: 9142 - DNA, 201 bp, Homo sapiens
atagaaaactgattgaaaacttaaagacgacagatatgaaatcccacatgcaaactctacacaaagaccaaaatgtaagctgggaaacaattcataatgcyccctacattatcagccttcagcacaagtttggcacaaacccttctgatttagtatctcagtaaccttgtgagaaaagacacagagaaaccaacacattat

SEQ ID NO: 9143 - DNA, 201 bp, Homo sapiens
aaatacaccttcgaagtattttatagctaataaatgtgagaagttcatacgggtgtataagcacactgaactgcacgtacctctgtgaagcatccacacgrtaactctgtaatttgaaaattctaacatgtttctctttttgttctgattaaatattcagtactgatgccataagaaggcattaaattccaacatatccct

SEQ ID NO: 9144 - DNA, 201 bp, Homo sapiens
atttttggtctcttaccctcatctctaccacaattcattatcaaaacaacaacaaccagagtgccccttttaaaccacaaatctggtctcacaacttctargttacaaccctaactcttcaagatttcctacctctcttgggatacatccaaaatagtgattatgacctactaggtcctacaagatgtaacccctgcctcc

SEQ ID NO: 9145 - DNA, 201 bp, Homo sapiens
cggcctcttttaaagatcccagcctaatgcactttctggagcaacaatcctattttctttgcatcatcaagttctgaggatgtatttttcatttgtcttgkcgtctgttagaaaaggtgaagatgtgtatacattttggttttcaattctcctattatatcagcttctcagcgcttcactttccaaatgttcaaaagaggt

SEQ ID NO: 9146 - DNA, 201 bp, Homo sapiens
gaagacacttttacaaatggacagaactcattcaaaaaaaaaaaaacaaacaacaacaacaaaaaaaaaaaaacaaccaacccaacaaaaaacactcattmtgttttccaatgagagaacggataactactgggtattcgtacagtgaaaatctacaaagtaaaggaatgaattagacaaacatgcagagcaaaaaagtgg

SEQ ID NO: 9147 - DNA, 201 bp, Homo sapiens
aaacaggactagtgtaacaatgattacctaataggattctctggggattaaataaggtaatatatgtaaaactctttgtagcaccagggacttaggaatgygacctattattaaaaattatttgaacagggggaaaaaaactgtatagtgtggggtggggtggttttttaaaaaagccattttaataaaaatttaaatctg

SEQ ID NO: 9148 - DNA, 201 bp, Homo sapiens
cccaggctagcctgcaagcgggagagagactacaggctatctatggtgaggacagcctagagcagccaaacctcagccaactcagcaggagtgagcccagytgataacagtccaaattggtaacctgcagaatcaggatgtgagtaaaatggtagctgttttaagccactaagtttgtggtagttcattatatagtaaaag

SEQ ID NO: 9149 - DNA, 201 bp, Homo sapiens
atcagaaacacctaaaatttaaattgattaaaacacagggctcggctcggtggcttacgcctgtaatcccagcattttgggaagtcagtgaggcagattgyttgggcccgggagttcaagaccagcctaggtaacatggcaaaaccatgtctacacaaaaaaatacaaaaaattagccaggggtgatggcgcgcatctgta

SEQ ID NO: 9150 - DNA, 201 bp, Homo sapiens
tgcagtggcgcaatctcggctccctgcaacctctgcctcccaggttcaagtgattctcctgcctcagcctctcgaatagctgggactacaggcgggtgccratggtggatgttttaatgatgacgttgatggtactgacactgatattactatttctttcccaacaatcttggaacaaggatgtacacaatgcatagtacc

SEQ ID NO: 9151 - DNA, 201 bp, Homo sapiens
gatccaaactctgatgaaataactatcagaacactttgtcaaaagtaaaaaaaaaaaaaaaaaaaaaaaaaaaaaaggtttgctttctttccagaagatgsaaagagatgaaaagatggaaggcagtattaatcaaagtatgagcaagtgaatgaagacctcaagaagaaatttttaagctgctttaatgactataaattt

SEQ ID NO: 9152 - DNA, 201 bp, Homo sapiens
tgaaaagggcactgataaggtgctcaaactctcattcttaaactcactgccttcttttgtccatctctgtccaattctagacccatgctgacttgacgccrtatctcttttccttctcctaactcatgtttaacttctgctattcagctcctatctacctctcctgaaggagacattcatttctaaactacaaatgcagtg

SEQ ID NO: 9153 - DNA, 201 bp, Homo sapiens
cataagaaactgcataaaacaaaagcattataaaatccaaagaagaagcaagtaacaaaaacaggaaaagaaatcccaacatgtaactgggagagttaatrttattaacatatagagcactgaaaaaagaagcctcatcccccactcctctccccaccgaaaaacaacaaaagaaatatacacaaataatataaactagaa

SEQ ID NO: 9154 - DNA, 201 bp, Homo sapiens
cccccattcaatgtatggcattatctaccctggctattaaaacactcatactaggtaatgttccctttgttcacaaagtgagattttttaaaatgcaaaaraaatcataatggatattccattatcattatttagaaaacactaagagaattcaacacttgagcctgctgaggacaccgcatcaatcaacaaatttaattt

SEQ ID NO: 9155 - DNA, 201 bp, Homo sapiens
tatgaggtgcaatatatacgaacctaagaaaattatatgctgacataaaacagaaaaagaactgaaatatcaaaggaggccgaaccataaacttgtaaggkaatattgcatttagaagctgtaaaacatgatcactgtgaatatcaattagctgttaacagaataattaaagtagccatgtattcaattaattgaattcta

SEQ ID NO: 9156 - DNA, 201 bp, Homo sapiens
cgagcgagggctgtgaggactgccagcacgctgtcacctctcactaagacataaagtacaagagactgattatgggggcatgtgtgggaagggtggaggaragaaggagcagaagaaagcaggagagcctcagactgtgctgcaggtctgacaccagcaacaggagggaaggaaggaagatcatacgcagctctgggaaaa

SEQ ID NO: 9157 - DNA, 201 bp, Homo sapiens
agcgagggctgtgaggactgccagcacgctgtcacctctcactaagacataaagtacaagagactgattatgggggcatgtgtgggaagggtggaggagaraaggagcagaagaaagcaggagagcctcagactgtgctgcaggtctgacaccagcaacaggagggaaggaaggaagatcatacgcagctctgggaaaatc

SEQ ID NO: 9158 - DNA, 201 bp, Homo sapiens
gggattacaggcatgagccactgcgcccggccaaagatgggactactaacagtacctcccacataaagatgttatgaggtcaaatggtttaatatgtaaastgcttaaattttctatatgtttgttaaataaaaactgtaactgccacaatgacaatacttggttctgctcagcagcccacatgcactgtgccaactagaa

SEQ ID NO: 9159 - DNA, 201 bp, Homo sapiens
agtactccatctcaaaaaaaaaaaaaccaaatcaacaaaaaaacactctgcaatcctatttacctcaacaagctctcaaggtcatccactggaagagagcrgcaaggatttcgagctatggtaaggaggaacggactttggggaaacatggggtcagggacaggacaactgggaaacaccttaaaacagactgagcccagt

SEQ ID NO: 9160 - DNA, 201 bp, Homo sapiens
agaaaaggcctcactctgtcactcaggttggaatgcagtggtggaatcatggcttactgtggcctcaacctccggggcttcaagtgatcctcccacctcarcctcctgagtagctgggaccaccagtgtgcaccatcatgcccagctaattttatttttggtagagatggggtctctctatatttgcccaggctggtctca

SEQ ID NO: 9161 - DNA, 201 bp, Homo sapiens
gaaattgaattcttacaaaaaaaaaaattaatcccatactcagacataactagaaaagagccagtcgtaatcctctatatcatacttctgcacatagtagraaaaagtgatcccctcaaccctctcctcttttaactaagtatctgtattatacagccaaacatttctttattcaacttttcaactgcaatgtggatcttt

SEQ ID NO: 9162 - DNA, 201 bp, Homo sapiens
aagaaaattccaagtactgggacaagtttcagtattcaccccttgaaacagttctttttcaaagtaataagattaataatctgcaagtctctgcatattasgctcatcctaaaagtaaacagtaaataaacccaatatttatttgaaggaggtatcaacaatcccaattgataggtaaatatactgaaataaagaagagct

SEQ ID NO: 9163 - DNA, 201 bp, Homo sapiens
ggaagtattctatccgtaaaaggaatttgtgaggcgcaaatgagataatgtacatatttgcattctgtaagctgcacttttgatatatagtcatcccctgktatctgcagaggattggttccaggacccccttcagataccaaagtccacagatgctcaagtccctcatgtaaaatggcatcatatttgtatataacctag

SEQ ID NO: 9164 - DNA, 201 bp, Homo sapiens
cacttctcaggacactggaatagaattgcatcacaagtgtcttatctgactgtgtaccccttgggctgtcttagcctcctactctaaagaataaatggggmcaggtgtggtggctaacgcctgtaatcccagcacttcgggaggccaaggtgggtggatcacctgaggtcaggagttcaagaccagcctggccaacatagt

SEQ ID NO: 9165 - DNA, 201 bp, Homo sapiens
tatcagtcttcaagccggagtaagctttatggtgttgcctaactcacttcctccttcttaacctcccactcctaattttttttttttttttttttgagacrggagtctcgttctgttacccaggctggagtgcagtggtgcaatctccgctcactgcaacctccacctccctggttcaagcaattcccctgcctcagcctc

SEQ ID NO: 9166 - DNA, 201 bp, Homo sapiens
gagcacatcctgggtgagagagagcaatgaacactagaactcagggtcaggagagagaggtgaaaagagcctcatgtaatgtgacatgaaaaagaaagatkgcaggagggacacagaaaagaatcaagacagtgtggaatcaaacagcacattttattgttcacttgtcaaacacatgcagacactaagacaaagcaaaaa

SEQ ID NO: 9167 - DNA, 201 bp, Homo sapiens
acatttatactaaagagatggtttggcatagtagcccagagcatgagtctggagccaaactgactggtgactctagacaaatcacttcacttttctaagcytcctttctatcatagggtgtttagtcaatttctgctgctgtaacagaataccaaagactgggtaatttgtaaagaaaagaagtttgtttagctcatggtt

SEQ ID NO: 9168 - DNA, 201 bp, Homo sapiens
ggtgacacagggtgccttacaactgctggcaacccaaaaattaggaacacagtactgttggttttaatatcatcatctcccttgattctccaactgctcckctatcaagactctagcagggctgagtgatctgagagagcaggagtgcagattggctaagatttagccaagaagacattcttcttagcattgtcgggaata

SEQ ID NO: 9169 - DNA, 201 bp, Homo sapiens
ccttgattctccaactgctcctctatcaagactctagcagggctgagtgatctgagagagcaggagtgcagattggctaagatttagccaagaagacattyttcttagcattgtcgggaatagtaaaaaaggataaagaaaaaaaaaaaagaaaacaccacaaatatccaaaaatggaaaaatggtcaaatatccaaaata

SEQ ID NO: 9170 - DNA, 201 bp, Homo sapiens
tgattctccaactgctcctctatcaagactctagcagggctgagtgatctgagagagcaggagtgcagattggctaagatttagccaagaagacattcttyttagcattgtcgggaatagtaaaaaaggataaagaaaaaaaaaaaagaaaacaccacaaatatccaaaaatggaaaaatggtcaaatatccaaaatatac

SEQ ID NO: 9171 - DNA, 201 bp, Homo sapiens
taaatagtagtaaaatatgagccgaaatttgtacctcctccatcctatccatacactccccagaagtatatatgcatggtaaaaacaggaatcaaacagcmagtattaacactagtcatcaggagtggtaggattatggatgttttacgttttcaaatctactggtgcaaatttttgtataataaacattttgtataataa

SEQ ID NO: 9172 - DNA, 201 bp, Homo sapiens
ccaccaggacagcagcagtcccactgaggggccaagtagagcagatatctccattctgtatgcactcgacgtccctcgccatctgcctgtacctctagacrtccatacagcttgccctgacggaggctcattgtggtcctactcagataaagcataagcctgatcacagactgcatgtgtctcaagctccatgaccttgtc

SEQ ID NO: 9173 - DNA, 201 bp, Homo sapiens
agggaagtcatagggtcccaaactatcacactgtgtggcagggcacatcaccaacaacgtcaaggtagaaaggaggctttttccctcagagggtgtgtgtktgtgtgtgtgtgtgtgtgtgtgtgtgtgtgtgtgtgtgtgtgtgcggggtgggctggaagacattcctcaatcaactattgttcttccctacctatgcag

SEQ ID NO: 9174 - DNA, 201 bp, Homo sapiens
atgtgtctatcaatggtggtcttgccaaattaaacacttccagcacacttgcccttaattctatcttgagagagagggaaattaagaatttcaggccaaayagagaagaaaggggaggccatgccaaatgagtgaaaagtctatttttgaaaaggcataacctggcagtagcctcaaatcacaatgttattctacctacac

SEQ ID NO: 9175 - DNA, 201 bp, Homo sapiens
agatggagagacacagttaaaatatgctgcattctaaaggaggatgttatttagaacttgttctttttgatgcctccagggttgaaactgagccactctcktaataatatattgagttcatcaaggaggtaaaaagtaataatcagtttgaagcaccaatacattcttctatcacctgtgcatgacagggaatgatgggaa

SEQ ID NO: 9176 - DNA, 201 bp, Homo sapiens
tggatgcctgctgcattttgaagatacgggatctatacagatgctgaaagcatttttagttcatgaaaagaaaatttccaaaacaatggtttttcctcaaytcacccacaatatagaatattaatctataggtctgaatgaaattcttcacctcttttttgcccattccactttcttcttactaaaactctagcaatgaca

SEQ ID NO: 9177 - DNA, 201 bp, Homo sapiens
caccctgggagaccaaggcagaaggatcacttgagccaggagttcaagatccatagcaagactctgtctctacttaaatttttaaaaataattaaaatttwaaaaatctaacattaaaccagcataatgtagtaagacataaaaaagagtgagtcaaaattttaactggaattttaaaaagaaaatataactgcaaagtca

SEQ ID NO: 9178 - DNA, 201 bp, Homo sapiens
tgcttgagcctgggaggtagaggatgcagtgagctgagatcatgccactgcattctagcctgggcgaatgagactccgtttaaaaaaaaaaaaaaaaagcmatctacatgacaaatatttgaaggtaaccatcgtctctttctccaaacttactcaactcgtccatttactgaatgcacaccaggcactgtgctaggcatt

SEQ ID NO: 9179 - DNA, 201 bp, Homo sapiens
ttttgccaagatttgacagctgaagttttcatgaaggaggcttcaaacaaaactttttttaaaaaagaaaaaataatacaaaggctgtaccaccctctgcyctccttaaaggtgacagaaaataaattctttatcaatagtcatttgtccaggttacagctaggctgcccaccccattccacctgagatatgaaattggct

SEQ ID NO: 9180 - DNA, 201 bp, Homo sapiens
tattaggattccgctaactgctaacaaaaaatgtttgaaaacaacaggagggactggaagggagggaggcttctctttgctatggcttccgcatccctttytcactctctataggaatttatctcctttcatagaaacaaggctgcacctgtgattgagttagcccaggcttttaaatccagaatgtagtttaaacacaca

SEQ ID NO: 9181 - DNA, 201 bp, Homo sapiens
tattagatcatatgatgagcatcaattaaaaaaacacaaaattcacccaacagaaaattcaactattgtgactacagtaattattaatagctcactattcmctgcttaggatatgctaaaaacataaatggacctcatttaattccaatataacagctctgttattaccatttcacagatataaaatctaagactgtgggg

SEQ ID NO: 9182 - DNA, 201 bp, Homo sapiens
aaagtatgggaacacgggctttgctgggttgctatatttttaaaaatgaggtgtgggcgtgcagctagtcattacattggcttaaaatattttataggccrggcacggtggctcatgcctgtaatcccagcactttgggaggcagaggcgggcatatcacaaggtcaggagttcgagaccagcctggccaacatggtgaaa

SEQ ID NO: 9183 - DNA, 201 bp, Homo sapiens
tggaatcggggtgaataatgtgaattaggctctgaaatgattccttttcctagtacacactcatagacattacagggcaaagaaaagtctgcaataaccasgctgtgtctgaacgtcgccttattgctcagtgtgacccaaatgtaaccagaccaaatccatcagcagctgaatgtaaatggccttgtgctaggcttagtt

SEQ ID NO: 9184 - DNA, 201 bp, Homo sapiens
aataatgtgaattaggctctgaaatgattccttttcctagtacacactcatagacattacagggcaaagaaaagtctgcaataaccacgctgtgtctgaaygtcgccttattgctcagtgtgacccaaatgtaaccagaccaaatccatcagcagctgaatgtaaatggccttgtgctaggcttagtttcaacaggcattc

SEQ ID NO: 9185 - DNA, 201 bp, Homo sapiens
catactttggagatactgcaggtttggtttcacactatcacaataaagtgagtcatgcaaactttttggtttcccagtgcgtataaaagtcatgtttatamtacactgtagtctgttaagcgtgcaatagcattatgtcaaaaaaagtacataatcttaatttaaaaatactttatcactaaaaaatgctaacaatcatct

SEQ ID NO: 9186 - DNA, 201 bp, Homo sapiens
aatattgagcttctcagaggctatttggtgatgttaagatcctaggtatttctggccgggtgctgtggctgacgcctgtaatcccagcactttgggaggcraaggagggaggatctcctgagcacaggagtttgagaccagcctgggcaacgtggcaaaatgctgtttcttaaataaataaataaataaataaataaataa

SEQ ID NO: 9187 - DNA, 201 bp, Homo sapiens
tggtgatgttaagatcctaggtatttctggccgggtgctgtggctgacgcctgtaatcccagcactttgggaggcaaaggagggaggatctcctgagcacrggagtttgagaccagcctgggcaacgtggcaaaatgctgtttcttaaataaataaataaataaataaataaataaataaataaataaaataaaacaaaat

SEQ ID NO: 9188 - DNA, 201 bp, Homo sapiens
cactcgctagactctgagctctgtgatggtgggaaacaggttctccttgtttgttgctttttcctgtgtccccagcccatgtcttggaacatagttggatrtgtccacaatcaattatcctcaggaacttctaggggaaaaaagatgtctaaagcaggaggtgacaaacttttgccataaaaggccagagagtaaatattt

SEQ ID NO: 9189 - DNA, 201 bp, Homo sapiens
tatgtacattattatgtaagctctgaattaggtgctgccagcatgttactcaggaatgcacaatccaggagcaatcagcaagtattcttattagaagctcraaaagtaggaggctactagaagggcttcagtcatccatgtcttaatcaacagtgatgttttgctaattagcaaaatgactgctggaaatgggattttatt

SEQ ID NO: 9190 - DNA, 201 bp, Homo sapiens
ttgccattaaaaatcatgaagacttcttgggttttcattgttttaaaaattcagctttcaaaaaggttccccttaagccagcactacctaacattaaaacrattaattaaataaatgtgaaaatactcagaaataatgcttttcaagtaaggcatggtattccagaactttatttttgtggtaaataaatataaaagaatg

SEQ ID NO: 9191 - DNA, 201 bp, Homo sapiens
gtctataccttaaacatattattcctcattccataaaaaatcttgaaaaaggtggtggcaggggataaataaaacagaggggcattatattatctcccagsttgatactgttataatttctactcgatgggcacatatacttctactgtaatcctgagatttctcactacagtactcaacaaaaactacacactggaattc

SEQ ID NO: 9192 - DNA, 201 bp, Homo sapiens
caatcaatttcatgcctctctgacactactcatctgcaaaaaattcattccttgacagatgttttatttctagtattccctatgaaatcacactaaaaaarttcaaaaacaaatacattgattttaaagccacactaagcagtatactagattttttaattttcacctcaaaatggtagaaacatgtatagaaagagaaaa

SEQ ID NO: 9193 - DNA, 201 bp, Homo sapiens
gtactgctttagttatactttctttactgaaatttccattatggttattataataaaaggaaatggcactttgtatattgccttattctgtttctataaargaggaaaataagcacaaatatgtgggttaaacattttctaatgtctaaactttcattaatgtcatattttgatagttcacaaagtatcttaatttagaaa

SEQ ID NO: 9194 - DNA, 201 bp, Homo sapiens
ggcaaaattcaacaggattctcaatcaaaattcaatttaatttaattcaattaaaactaggcttctgtaaaacctcagagagtaactatgatgcactgggrtcagtgttctaagtaaactaataaaattgtatcacatctttcttattgttgtcttgggttttttgtctgtttgtgcttatggcttgaatgtttctcccct

SEQ ID NO: 9195 - DNA, 201 bp, Homo sapiens
aagcaaattctagaggttttcttagctctttattagttagggctcctcagatgcttctgtgtgtttgagcacacggggagctccctgagctagctccctgrtctcccagtcgtccccacactgggaggactggcccaagcattggaccttccttccaacccctacccagaagccaaaccaaaccgcaaccttcctgggctt

SEQ ID NO: 9196 - DNA, 201 bp, Homo sapiens
caagtagcacagagaaaaggtgtcctaggcctggggagaaaaggactgaagcgtgagtcaaggactgtcactacccatccatggagcagtagttaccatawccagccaagccctcctctgccctgccactctacctagaccaggcagcagctgaccttcctgattgctagtttccaactaacatcctttctttaccttatc

SEQ ID NO: 9197 - DNA, 201 bp, Homo sapiens
gcctggtgcagagggcaaccctgtagctggagcgagcagggaaggcttctccaaggaccttccaccatggagagaatccaggtggaggactggggtgggamtgggaggagtgaggggagaaagcggtggccaggattcagcaggggaagaagcctagcacacacagaatcctgaggggagaggcctagctggaagaaaggg

SEQ ID NO: 9198 - DNA, 201 bp, Homo sapiens
agacacctgggcttctggccttaatacgctagggtccaggacgggagaaacccaggctgagcgggtccggagaagatggggccttggggtccgagtccaascactggccctccgcccgtccacgggcactcacccggatgcccttcaccacggtgatgttctcattctcgtccgcctcgaaggtgacccggcgggtgctgg

SEQ ID NO: 9199 - DNA, 201 bp, Homo sapiens
gcacttttaatttccttcaagaacacttcctttgcattcacaacttggccaattgtttggtgcaaacggcacagcttttagcttacctaggctttgcacayatccttctcattaagcttaatcatttctagcttttgatttaaagaaagatgtgtgactcttcctttcaattgaacactcagaggtcattgtagggttatt

SEQ ID NO: 9200 - DNA, 201 bp, Homo sapiens
gttgcgtctcagggaataaggaggcctctcaggggagggaaaagagatggggaaatggctgatgggtggaggagtcagaacacacacgtaacagttatcarttaagttcagctttttatatgggtgtggtctgtggtgtcccaaaacaattacaatagtaacatcaaagatcacatcatagatcaccatagcatatataac

SEQ ID NO: 9201 - DNA, 201 bp, Homo sapiens
cctttattaaatacaaaacagaaatatatgacacacacaacaacaacaacaacaacaacaacaacaaaacacaaaaaaggattaagtcattttctgaggaytaaattctaaggcaagtgtttggaattctgaatgcatttttccattagaaaatggtcctaaggcagcctgcaaagcctgaagggcacttcttatcaccac

SEQ ID NO: 9202 - DNA, 201 bp, Homo sapiens
ccagtgcaataacatccaagtaatttagtcatccatatccatacatatgacgaatgccctaaagaaattaggttaaatctaacagccataaaaccagaagraagaataattttaagatttcgagatgcaccccacagcactactcctttattttttctaatgcactgctaattgttcattataaataactacactcttcat

SEQ ID NO: 9203 - DNA, 201 bp, Homo sapiens
ccattccatggtcccattttccctgtccagtgagttcccaactgtgctccaatgaggactaaaggttccgaggagtaacatctgggtttctaggaaggccraagtggaggctaagcagtcaacactccaggtttcacccagagcagctccacttttatctatcaaataacaataagaaattgcttaataaattatgttgaa

SEQ ID NO: 9204 - DNA, 100 bp, Homo sapiens
aaatttcctgccggcaaggtcccagcatttgagggtgatgatggattctstgtgtttgagagcaacgccattgcctactatgtgagcaatgaggagctgc

SEQ ID NO: 9205 - DNA, 100 bp, Homo sapiens; identical to SEQ ID NO: 9204

SEQ ID NO: 9206 - DNA, 100 bp, Homo sapiens
agtacctgggtgttccccaccttgggcatcatgcaccacaacaaacaggycactgagaatgcaaaggaggaagtgaggcgaattctggggctgctggatg

SEQ ID NO: 9207 - DNA, 100 bp, Homo sapiens; identical to SEQ ID NO: 9206

SEQ ID NO: 9208 - DNA, 100 bp, Homo sapiens
gatctgcaggccaaaattcttcagtgttaccgtgagaacacccaccagamcctcaaatgctccgctctggccacccagtatatgcactgtgtcaatcatg

SEQ ID NO: 9209 - DNA, 201 bp, Homo sapiens
cccctttccccctttcattcccaatatccattctgtcacgtagtctagtctaaattctaatagatctagaattgaccacttcctttttttcttttcttttytttttttttttttttttttttttgagatggagtcttgctgtagcccaggctggaatgcagtggtgcaatctcacctcactgcaacctctgcctcctgagt

SEQ ID NO: 9210 - DNA, 201 bp, Homo sapiens
aaatttacccaaaataaaaccagtgagaggtatagccagaattaaactcagcccaacttcagagcctgcattcttacagaaaatacacacacacacacacmcacacacacacacacccacacaaatatacagataccattaaaataagtggcatgggggtagaactttgtcttatataccattgtaatccccacattaaat

SEQ ID NO: 9211 - DNA, 201 bp, Homo sapiens
tacagagcacagttttccttctgaatatctttcccgtccacctactcaatactcttcttaaaggctcaactaaaaagtcatcttctttatgaaaacttcayagatcactctagtcaaaattgatctctaatgtatccgaaatttagctgtttttatagctattgtcttagaataaagaaatattcggggagccaactcgaa

SEQ ID NO: 9212 - DNA, 201 bp, Homo sapiens
actcagaactcagggcttttggctggagggatccgtagtctggtggggtctgtgttattcagctttcaccttataggttctactgtctctgtattggttcygtaagtactgctgttgggctgaatttcaacgctgcataaatttaacactgcataaattaacataggaaattccctaaagaatgagggagaagctttgcaa

SEQ ID NO: 9213 - DNA, 201 bp, Homo sapiens
cctagaataacagagctagatggccctcatggatcacctggttcaaaccttcagtttatcaaagcaactgaagctcaagtcactataattagattaggatygcagcagcagtatttcctataaaccccaccctcccagtgaacacaaaatgtgccagaagggtccagccagcttctgcatttttctgtcaatagcagcagg

SEQ ID NO: 9214 - DNA, 201 bp, Homo sapiens
ttacttaattcttacttaaaagataccaggactaagaggcaataattgtacagagtttggtgactcaacataactgatggcaacatgaactcaatctggarggaccccaaataaacttccagatcacatataatttagaacaaccatgtactcatgggatgctattttctcaagcctacaaagtcttctcaacaggcaaaa

SEQ ID NO: 9215 - DNA, 201 bp, Homo sapiens
acattccctcccaaatttgttaagagtaattacttacagtatatggaatggggaagaaatccattaagatgaccttaaaaagataaataaagagaacaaaygggccgggcgaagtggctcacgcctgtaatcccaacaccttgggaagctaaggcgggcggatcacttgaggccaggaattcaagaccagccaggataacg

SEQ ID NO: 9216 - DNA, 201 bp, Homo sapiens
gatccagaaagtacattatataaaataggctatgggaaatgttttaactgcagagtgggtgttcacagtggcaagttagcaggtatttttaccatatttcrtaccacagagaaaatgagaaagaaaaacaatttaaaacagttgttatgcctttatctttacactgtagcatactccaataaaaaagacgttcacccacaa

SEQ ID NO: 9217 - DNA, 201 bp, Homo sapiens
tacaactcttgggttaatgggcatggtgctgaatcttgacatgggaagatcaaggagaaaccccactacccattgctcccaattctgaggaggttggaatmatgcaagcttgaatcaatggacacctaaacacaaaaattagataccttgggctacagttttctcaaagactcttggaaagggtgaggattaggaagagaa

SEQ ID NO: 9218 - DNA, 201 bp, Homo sapiens
gatgtgggcacttctatttgatgatgttatgagctaatattatttgcaaatgttttaatgaccaaatatatctttttaactgaagctaatgtgttgaaacrtaatccttacagacgcacagctgtctcatggtctgaacataaaactgggattgaagagcactttctaacagaagcactgcaatttcctttaaaaaattta

SEQ ID NO: 9219 - DNA, 201 bp, Homo sapiens
acacatttcaaatccctatgccccttgcagctctgacacttactcttctaagaaattgtaccaggttttctcctcattcacccctatggcccagtcccatytccagggcctgaattactcagcccttttgcactttgtgcttctatctatatgcaggtatcagtcttctaactagaatttaagacccaagagagttcaagt

SEQ ID NO: 9220 - DNA, 201 bp, Homo sapiens
gccatgccattctgacacttcaaacaccaccaccttatttctgatatttttatcctcctttgcagtcaatgtttaattctcaaaccctccacgtttaccayttcctggttatactgggttccttatattactggcaacaccaaaaatgaggaacacaataccgttgggttttaataccatcatctcccctgcttctccaac

SEQ ID NO: 9221 - DNA, 201 bp, Homo sapiens
ttactgacaactctttagcaccacaataactaggaaaataatagtatttagtgctttcaaatgaatacatataatcaaaacgtcaatgtgatttacaatcrcaaaggagttgtcaagaaatgttaaatatctaaatagttttgaaaattggctttgcatcagaaagctcaaatatcatttttgaagaccatataactgtgg

SEQ ID NO: 9222 - DNA, 201 bp, Homo sapiens
taggcaagaccaaagccaacccaactactgggctgccaaccagcagcaagaggagaatgacatcttgcctctttcatgtccttaatccatttttcacatcragggttaagcattagaatggtgtattttaaaaatacacatgcctaggtcccaccctgtaagtctgaatccactggggcatttatactctctaattgtttg

SEQ ID NO: 9223 - DNA, 201 bp, Homo sapiens
ttgcaatacagggattcacataagagaatgtttttaaatactgaaatttacagtttgacatgccagaactttttaaatgcaaaatggtttctatggaaatsgtagtgctaatatttctcacccacgctggtaaacaaattattctcaatccctgatagcattatgattgtgcatacattatttcactaagcaagaacacac

SEQ ID NO: 9224 - DNA, 201 bp, Homo sapiens
aacatttagtttcacagtctctttgaatgtttgctttatcatctctaataggaatcaatgatagatgtcctgcccatatcaaacacccaagaagatagtasagttgaaggctcttagttaaatgaaaaaaaaaaaaaactaaatctaaaaacaaatattgcttttactgtgatgctgcttatcagcaaagctcataagctt

SEQ ID NO: 9225 - DNA, 201 bp, Homo sapiens
aaacacgtttctcctttttcactgcagtagcaaacatacctaaagctgccctgctactccacagaaaacttggttcacagtctcttcataaggttgtataygcattccagctgataataataatgctgccataacacacaggaggtagaggccacacgtgataacaaagaacacaaaggagaaaacagaatctggatactt

SEQ ID NO: 9226 - DNA, 201 bp, Homo sapiens
cataagattgcattagatttctcagtagcctcatcacacaattagatcatattaagttacaacccactaaaacccctcattgtacatgataaagataaatyactttggcactgatttttgccatagtgcctggcacatagaggcattcagtaatcactgaatcactgaagatttcagtctaatctcatgaacaaagatttt

SEQ ID NO: 9227 - DNA, 201 bp, Homo sapiens
aagagtaactaaaatccaaacaggaattcagacaggtgagaaaatgaagtctttgtaaccaaaatactccagcataactcagctctatatggaaaagaacytgcatgtcagagttgccaacattttccgcacttgaagtcttgactatgcctttttccactgtcatctgggaagccaaggaaaattataaatctcaaataa

SEQ ID NO: 9228 - DNA, 201 bp, Homo sapiens
agagggaccagtcatgatatatgatggaagcccagggaagcagctcagactatattctgtgtaccatggagagccaccactgggacatgacttgacctgayttgcttttcttcaaaagattgtgaggacttctgtgtgcacagcacagggggaaagagtgaagcagggagccagttaagagacttccacagaagacgacag

SEQ ID NO: 9229 - DNA, 201 bp, Homo sapiens
gctgcagaacaactcatctttctgataaaaaatgacccaaaatgggggtcgatagtacaacacaagcttctgcgatggcagcctctgtgtaagaagtatcytgcggtcaggtgtggtggctcacgcctataatcccagcactttgggaggccaaggcaggcagatcatgaggtcagaagatcaaggccatcctggctaaca

SEQ ID NO: 9230 - DNA, 201 bp, Homo sapiens
ccattattatttgggagaaattactcccaaatagttagttaagagaaagggggagagggaacccatatatatgttgatagatatatatgaaatatgtaatkcttagcttatgtctgtgtttctttacatttgtcattagtagaaaccattatccctacctttataaaatcctagataacttaagatggtagccaaaaactt

SEQ ID NO: 9231 - DNA, 201 bp, Homo sapiens
atctctggagcaactcagacagaggggcttaacagtttagaagaaacagcttatgattccccacctaagagaggaaataaaatgcatttaagtgaatgccwcccatttaattaacaaaagaaagagtagaactagattttaggtaaggatggaagcaactacaatacacttaagctgtcaggcctgacaactgacgaagag

SEQ ID NO: 9232 - DNA, 201 bp, Homo sapiens
acgggttatgaaatagtgcctatgtcagtagaggtatgtttaataggacaggaaaaaataattagaggaaaaatttattatttgtatgtttatcaagcttsagcaaaaatactttttcattatacacatacatatatttaattttctttaaagatttattaaaaaaataaaatatgtcaaaggtcaaagaatcatgaaaac

SEQ ID NO: 9233 - DNA, 201 bp, Homo sapiens
cacgggcactcacccggatgcccttcaccacggtgatgttctcattctcgtccgcctcgaaggtgacccggcgggtgctggtggtcccacccatgattcckgttcctgccccagcggagacctagcggggaaccacgagcacttcggggcccccgcacccacacgcgcgtggaagggcctggattcttttcccgcacagcg

SEQ ID NO: 9234 - DNA, 201 bp, Homo sapiens
aattagagctatttaatatctctttaccctcatgaagagcacataagttaatacacaagaaataatagcctaaatgtctcatgtcaacccatgagaaattrttgaagaacagctgaagaaacactgatatgaataagtggataaataagcagagaggaagagtaaggctaaggaatatccggaaattttcctaacagtaaa

SEQ ID NO: 9235 - DNA, 201 bp, Homo sapiens
tcagatacagcttgtaccttaaacggttcacacttgagaagggagatggggcacaggcaacactgatgccacttacattgtcataagggctggagtgacawaaacacacagggaacaattaattaattatggctttttagtaggaagggaggtgtctagaaagactttacagagaaagcagaggaattaacacatgagaca

SEQ ID NO: 9236 - DNA, 201 bp, Homo sapiens
ttaaaaagggttacaatgataatagatattctataaagaaaaatatcacaatcgaaattaattacaaagtccttctcgaacaagtttcttcaaaatgtacrtacgtagatgcgtatgtccagctatgaagtgcttgagaactggtcaacaggtttgtgtgcatttggagggaaaagagaaaacttggcacgcagggtatat

SEQ ID NO: 9237 - DNA, 201 bp, Homo sapiens
ctcgagcaataaaatgttaaaaagtggttaacttcagaggatggaaacaggatttttatttccaaccttacttatgtctgtaacatcctaatttttttacrtgaacagaataataattagtgctatttgttaatccgggcactatgtatcacacacgatattcatcatgagccaaaatatttactttagtgcctgtggcag

SEQ ID NO: 9238 - DNA, 201 bp, Homo sapiens
gaaagccaaagagggtagacagaaagtagttcacttggcaagagtcaatgtggaacaggtaaaaggtggcagtgaagttatggccctggatgcttctgtgwtaaagaagaaaaaaagaaaaggatacttagtgatcacctgctatatttcactcagcacctgtatattttctcatttagtctccatggcaaccatgagaaa

SEQ ID NO: 9239 - DNA, 201 bp, Homo sapiens
aattagagtctcaggtttttttttttgttttttttttttttcttgatttggttttctaattagaataggaatcctagattcattgacagccctgccactayacaaggaaaaccttagttacattacctcatgcctcagtttcttcatctggggaattaaaataaacaactgcaccaaaaactcatttggcattctaagttt

SEQ ID NO: 9240 - DNA, 201 bp, Homo sapiens
tcacataaatacatagttagtaaagaattacagtgccactggatcactatgtggaaattttttatttctaggaagtggtttttgtaatgagtctctaaagmcctatatttctctgaagtatctaccttcatattcagttcttaagttagttgtgatcttatttcctttaaatttctctagctatttgtgtcagacaattca

SEQ ID NO: 9241 - DNA, 201 bp, Homo sapiens
tacacacttcaatctgtattaatgatttgatggtagaaagaggggaagaggaatggaaatcagcataattgtcctccagctccaggagtagactctgggayattttcttggattaatctgtaagggtaaaggtttgcctctgtattgatctgtaaagcttgttatactgccctaatgcactgttttcactttgggaaaatg

SEQ ID NO: 9242 - DNA, 201 bp, Homo sapiens
aaaaaagtacataatcttaatttaaaaatactttatcactaaaaaatgctaacaatcatctgagccttcagcaagtcacactggtggagggtcttatctcratattgatggctgcggtggtggccaaatggcatggctatgacaatttcttaaataagacaacaatgaagtttgccacatcaattcattctcaggggagag

SEQ ID NO: 9243 - DNA, 201 bp, Homo sapiens
aattgagcccaggaggttgtggcgagccaaaattgtgccactgcactccagtctgggtgatggagtgagactcgatctcaaaaataaacagattttttttwatagatagatagatagagagagagagaaagagagagagagagagagaacacaatcccacattgttttttgtttgtttcaatgaacaaacttattcctctt

SEQ ID NO: 9244 - DNA, 201 bp, Homo sapiens
gagccaccgttgctgctccaagtaggactacttggagtgtagctgaggccttggacgcagtatgaccaggggcagctctgccagggctgttggccaatcartcattttcatttcttgttggaggccaggtcctctgctgaactcatttcctagctagtgttaccctaattctgatgaagatcaatggggctataattcttg

SEQ ID NO: 9245 - DNA, 201 bp, Homo sapiens
acagcagtactgagcatgctgggagcttgggacttggagatgaatgagccaccgttgctgctccaagtaggactacttggagtgtagctgaggccttggaygcagtatgaccaggggcagctctgccagggctgttggccaatcagtcattttcatttcttgttggaggccaggtcctctgctgaactcatttcctagcta

SEQ ID NO: 9246 - DNA, 201 bp, Homo sapiens
aaagtgcttccttccaagaagagacgagatggtactgcgcataagcctcctttagggttgggtctttatgcaggcagatagtaagtgcttctggaacgttktgagttctgccccctactccatgagccgccgcaagatctggcttgttgggacctcatgggccagtggtcaggcccagcattatgaatctcttttggccaa

SEQ ID NO: 9247 - DNA, 201 bp, Homo sapiens
atgccagaggttgcagttttttgaatttttgcggtcagaccttggcaatgaccttgagcagtaggatataaataactcccatgtgcttagcattccaacartggaacgctaggcatacgtgggttgtcatctaaaacaggggacccatcccccaggccactgacaggtaccggtccacttggcctcttaggaactgggcca

SEQ ID NO: 9248 - DNA, 201 bp, Homo sapiens
tgtagtggtgcaatcatggcccactgcagcgttcaactcccggactcaagttattctcctcctccccagtagctaggactacaggtatgcaccactgtgcycagctatgtttttattttttagttgagattgggtctcactctgttgccccaagctggtctcaaactcctggcttcaagtgatcctcccacttggcctccc

SEQ ID NO: 9249 - DNA, 201 bp, Homo sapiens
ggatacagtcagatccccttctcagcagacccaagttcggcagattcaaggtcagacatggccacagctaagagctgatgtttatgaagtacttgtccggygccccaagcacaatagctctgaggttgatgctgttgttttacagatgggaatactgaggttcagagagagggaggggcttgccatgagttgtacagcctg

SEQ ID NO: 9250 - DNA, 201 bp, Homo sapiens
ttggtgtgaggttaaaaacgcgataatccatgctgtggggtacacaggagccctgggtctggtgtttgaagacagcttgaccttggatgagatcatgcctrtgtcaggtcacccacgctccatgcacctgactcatcagtgttagttcaaatagagcattggttagaaatcacccactgccacctcttcgcttgataggtg

SEQ ID NO: 9251 - DNA, 201 bp, Homo sapiens
tgggaaggaacttggcaggctttagaggccagtttcaatcctggtcacaccctttgtgtgaccttgggtaggtttagcctctctaagcctcagttttctcycctgtaaaatggggatcttcatatatcctccctctctggattggtgtgaggttaaaaacgcgataatccatgctgtggggtacacaggagccctgggtct

SEQ ID NO: 9252 - DNA, 201 bp, Homo sapiens
aagacgaggcaaatcgctcaggagatcatcaaggtgagggggtgcccagctgctgggggtgggtttctggccggttccagggctctcggctgttcctctcrccctgttactccctgttagggtggtttgggcagctttgcctctccttctagctcaggctcctcaagggtgggaccccatctcttcctccctgtctctgtc

SEQ ID NO: 9253 - DNA, 201 bp, Homo sapiens
gaaccagcgttaccagctagaccactcgctcacagcaggttgaacccaggacttctgccatccagtatgggggaaagagtgctggacagaaccaggagacygtcctggcactgccttctactttgtgtgagtttgactaagtcgttgtccctctctgggcctcagtttcctcatcagtttttcatctatttctgtgagatg

SEQ ID NO: 9254 - DNA, 201 bp, Homo sapiens
ctctgagcagttagaataatggttatcattgactgggtgcctatggcctgccaagccctatgctgggaacttttatcatccctctgaatcctcccactgasctggaaggtgctgtgatgtccattttgcagatgaggatcatcaagggcctaagttgtaacatactagcctggagtcctgctatttgtaagtggcaggagc

SEQ ID NO: 9255 - DNA, 201 bp, Homo sapiens
tgtgtggaatcctggctctgagcagttagaataatggttatcattgactgggtgcctatggcctgccaagccctatgctgggaacttttatcatccctctkaatcctcccactgagctggaaggtgctgtgatgtccattttgcagatgaggatcatcaagggcctaagttgtaacatactagcctggagtcctgctattt

SEQ ID NO: 9256 - DNA, 201 bp, Homo sapiens
gcagtgttcactgtggcagccaccctgctaatacattactctggggtcttgggtcagcaagttaggttactgagggagcttctgttggggtggagtggctkgttagggtggactttggaggcgtggacatgggtttgaatgtgtctaactggacagaggaagccatgagccctgtgtggaatcctggctctgagcagttag

SEQ ID NO: 9257 - DNA, 201 bp, Homo sapiens
ctttaatcctcgtgaaaccctatgaagcaataagggactattattatccacactttatacatataaatgaagaaagtgaggctttgtgaagttgaatgatrttcccaaggtcacccagttagtaaatgctgaagctggagtcctcagtcttagttattaatgtaagcttgcttttcaggacagagagggctttggaggacc

SEQ ID NO: 9258 - DNA, 201 bp, Homo sapiens
ggtgtggttgcgtttttggtcttttttcctgcaatagataatgagataacagtgaggggaagaaaaaacaatccttggtccgtggtgggtccatctggtcwttttatagacaggggaaatgtctctttcagtgtctgttaatctctaagggcctttagtttaaaatgctcattatatcagagagctatgttttgaggtcaa

SEQ ID NO: 9259 - DNA, 201 bp, Homo sapiens
tccaaataaaattgggtggttgaagagaggctggtatccctgtagacttatccagccatgagaaattgccttttttacaaagggaaatagggtgtctcctrggcatcacattagcacttaaatacatgtatcactgaatccttctaacaagaagaggaaacttgccgagagaggtgtgcccgcctgcctgcctgcctgcct

SEQ ID NO: 9260 - DNA, 201 bp, Homo sapiens
ggtccagctctcctggctcgggggttccttgccgaggcgcccgcgccccgggctcccagcctcggccgccgcggccccgatgccgaggcatggatagagcrgcgctgcgcgcggcggcgatgggagagaagaaggagggcggtggcgggggggatgcggcggccgcggagggaggcgcaggggccgcggccagccgggcgc

SEQ ID NO: 9261 - DNA, 201 bp, Homo sapiens; identical to SEQ ID NO: 1011

SEQ ID NO: 9262 - DNA, 201 bp, Homo sapiens
agattaggagatttgcccgaggtcatataagactcgtcaaaggtcatacagcgattcagagacagagctgactaccctactctctaaaacagctctattcraagttgtaaaggccatattccctgtccccttccctgcagtgccataccacctgttaccactgacacactgtgcatttatctgcttgtctgtttcctctca

SEQ ID NO: 9263 - DNA, 201 bp, Homo sapiens
atactcttagacaagtgagctcgttttgtctcagcctggggttgaatctcccatctacagtctgttgtcaggtcctcagactttgcattcccagtggagcwtagggaagggtaggaggccctgagctcccagctgtggccgttctcacccctggcctccttgggaatatctccacttgtggtctgggttagacttgtttgt

SEQ ID NO: 9264 - DNA, 201 bp, Homo sapiens
acatgactgattgctcccgtgttcttctgagggctggtcttgtttttgtttgggtggctctgtctcactgctaacaccttagtgagatgccttccaccctyctgagcacaccagcctcccactgggtgtgtgcctagtgcggggcgggcggaggttgggagggtgttggcttggcttttaacctgtggggattttgtccaa

SEQ ID NO: 9265 - DNA, 201 bp, Homo sapiens
cggaaggcaagggggagtgaggcgtcccacagtgtaggagcaggagcaaaagcaagagcgagagggggcagggaggtgccacacacttttaaactcactckctcgagaacagcaccaagaggatggtgccaaaacagtcatgagaaaccatgcccatgatccagtcacctcccaccagcccccacctccaacattgggatt

SEQ ID NO: 9266 - DNA, 201 bp, Homo sapiens
agcaagagcgagagggggcagggaggtgccacacacttttaaactcactctctcgagaacagcaccaagaggatggtgccaaaacagtcatgagaaaccaygcccatgatccagtcacctcccaccagcccccacctccaacattgggattacaattcaatatgagatttaaagttcttagcaagacattcaaggcccttc

SEQ ID NO: 9267 - DNA, 201 bp, Homo sapiens
cgagagggggcagggaggtgccacacacttttaaactcactctctcgagaacagcaccaagaggatggtgccaaaacagtcatgagaaaccatgcccatgrtccagtcacctcccaccagcccccacctccaacattgggattacaattcaatatgagatttaaagttcttagcaagacattcaaggcccttcctgatctg

SEQ ID NO: 9268 - DNA, 201 bp, Homo sapiens
gactggagcagtgagattattaggccttcagggccagtgtctccatgcagatcagatggaggcggtgcttggcacatacaccacctcactgcccatgcccmcagaagttggtgcagatcataaggtggcttttggggctaattgattgaagttccaacatagtctgtttctcctaggctggtagctggcacctttggcccc

SEQ ID NO: 9269 - DNA, 201 bp, Homo sapiens
tcatcctccaattgctgtggtaacacggggactggagcagtgagattattaggccttcagggccagtgtctccatgcagatcagatggaggcggtgcttgrcacatacaccacctcactgcccatgcccccagaagttggtgcagatcataaggtggcttttggggctaattgattgaagttccaacatagtctgtttctc

SEQ ID NO: 9270 - DNA, 201 bp, Homo sapiens
aatatcatagactgggtagcttaaaaacaacagaaattagtttctcatggttctggaggctgggaagatcaaggtgccagtaggctcgatgtcttgggaargtccaccttctcacagatgtcactcgtgccgcatcctcccatggtggaggggcccagcaagctccctcgaggccttccatgagggctccagtcctgttcc

SEQ ID NO: 9271 - DNA, 201 bp, Homo sapiens
tgcctgtgtccgccctctgcaggttctccaccaagtcctggctgtcgcaggtctgccacgtgtgccagaagagcatgatatttggagtgaagtgcaagcaytgcaggtgatgggaagaggagtgggggtggggggagcagacacttttagttcagtaaatcaaatgcgcttccctatgcttgctattcatagtcctattca

SEQ ID NO: 9272 - DNA, 201 bp, Homo sapiens
gcatagtattccatcgtatggaaagaccatattttagtcagctcctattgatggacacataggttattttccgtctttatgctgctaacatgctgcaggcrtaccttgtccatatatcttgcaacacatgtgggcctatgtgttggataaattcctaagaattcctaagaactgtggggtcaaagggtatgcgcacttgta

SEQ ID NO: 9273 - DNA, 201 bp, Homo sapiens
tcttattgtaccttacttttttaacttgacaatgtgatttggagatcattccgtatttgcacagaaagagcgtccttgttttagtttcttgctgcatagtrttccatcgtatggaaagaccatattttagtcagctcctattgatggacacataggttattttccgtctttatgctgctaacatgctgcaggcataccttg

SEQ ID NO: 9274 - DNA, 201 bp, Homo sapiens
tcttcaggaaagggacattcctggaggcagaaatgtagcgcagctctgaatgaggccccaaaagatgggagatgcagaagcccctttgggaggagaggacrcctgggcaacccttgaccccctttcccacccccacctccaggttgggagcacgttcctgcacgtggctatgctgtggggcctctctcatgagtcagagcg

SEQ ID NO: 9275 - DNA, 201 bp, Homo sapiens
gttgtctgtgctggtgaataggagatgaacattcctgctgatcctcccaatccttcacccgaggcagatatcactaacccacagatgtttctgtgtgactstagtgtcattctcaagcagccactgccaatcagctggtgtcggtgcacacatcaagacccactggccatcctcaagtgggcctagagcagtggtgattaa

SEQ ID NO: 9276 - DNA, 201 bp, Homo sapiens
aaaaaaaaaaaaaaaaaaaaaaaaaaaaaaaaaaaaagtgagtgaaggatggttgtctgtgctggtgaataggagatgaacattcctgctgatcctcccartccttcacccgaggcagatatcactaacccacagatgtttctgtgtgactgtagtgtcattctcaagcagccactgccaatcagctggtgtcggtgcaca

SEQ ID NO: 9277 - DNA, 201 bp, Homo sapiens
cactttagttttatcttctggaaggcaaccagggttttggccaaccagtgatgagcttcttggtacagttatgtgtctggctttattttggtgtgatcatkctaagtggtgatgtgattcttgcctacagccctgaagattgaagaatatactgaaaagctacaaaagcatctgccgtcagcgggtacagtaaaaaacaaa

SEQ ID NO: 9278 - DNA, 201 bp, Homo sapiens
tgtgacactttagttttatcttctggaaggcaaccagggttttggccaaccagtgatgagcttcttggtacagttatgtgtctggctttattttggtgtgatcatgctaagtggtgatgtgattcttgcctacagccctgaagattgaagaatatactgaaaagctacaaaagcatctgccgtcagcgggtacagtaaaaa

SEQ ID NO: 9279 - DNA, 201 bp, Homo sapiens
aaagatgccggggacatggccacacccaggaacccctgtttagttctgtcagtgccttgacccccaggagagctggggtcccccatggggagttacatctctagccacacctagcaccctgcaccctcctcataggattaccgcatcccagtttgccggcaacagtcccagctgaggcctgctgtcagggctctgccttcc

SEQ ID NO: 9280 - DNA, 201 bp, Homo sapiens
caccagagtcttagcaacatttcaggagctctccctgggtccctgggtcacttggccgtagccaagccaggcaactccctggtcttctggcagtgagctcrtttccatctgtcgagcctaactggcctctgttgggaatgcgagtcccttatttttcatcagaactgggccatgccctccttgtgcttctctgtatcccgt

SEQ ID NO: 9281 - DNA, 201 bp, Homo sapiens
gtttgtctgggaaagtagccccttggcgcttctgtgactgcaaccaactttccaagaagtgagagcagcttcatttcactctgacgggagtggctgcctgyaggccacctccatcctttgtcaaccagagaagttttgctccatcagcagaacccaaatctgtagaggttgtttcttaacaagttctgggagatagcagct

SEQ ID NO: 9282 - DNA, 201 bp, Homo sapiens
ccacacctgtggctcctgacacctgggccagcacttccctcagcctcccagcagaagcaccgagcagcagggctgctgtgtcatggacgcttagacctgcygtctgttgctttgcctttcctagccctcggtcaggtgtctgtgcggacacatctgttcccccaacttgtgtgggttcctgaaaattatggacccctgccg

SEQ ID NO: 9283 - DNA, 201 bp, Homo sapiens
tatccacacgcacttcagtctgtcctccttatggtttccagaatgaggatcgttcagaaatgcaaatctgatcacgtttttcccttcgcttcccgccccaygcctgcaagattgagtgcagatgcctgagtgtggcattccaggaccttctggaactttgtaggacctgcatgaactggtcctggtccctgactgaaacaa

SEQ ID NO: 9284 - DNA, 201 bp, Homo sapiens
atttaaggaagtaatgtagcccatggttaagagcatgggctgagcagctgaacttcctgggttcagtttcttgctctgccacttactagccgcatgacatkggactgttcctcatcctcagtttacgcctctgtacaatggggatagttgtgatagggcgtctctcacaggtttgttgcaaggattaagtgagttaattca

SEQ ID NO: 9285 - DNA, 201 bp, Homo sapiens
tattttaagttacacttccgtgaataggcttatgcttacacttaattgtttctttaggataaattcctagaagtggagtctggctcaaggggtgagggccrcctggtgaggcttctgttgcatcatcctgtttctctgctgccctccaggggggcgatgccgctccacgctcctgccatgctcctgccacagccacactgg

SEQ ID NO: 9286 - DNA, 201 bp, Homo sapiens
cccctcctcctcctccccctttcatcctttcttccttccatcattttcatatctgattacaagagtaatatatgttccttgtagaaactttgaaaagcatraaagaaaattgaaacactcttaaaaatgtatatatagagagaacttttcgaagctgagatcatcctgtactttttgctctatagcctgctttcatttttt

SEQ ID NO: 9287 - DNA, 201 bp, Homo sapiens
gtagctcacgcctgtaatcccagcactttgaggggctgagataggtggatcacctgaagtcaggagttcaagaccagcctggccaacatggtgaaaccccrtctctattaaaaatacaaaaaactagctgggtgtggtggcgtacgcctgtaatcccagctactcaggaagctgaggcaggagaatcccttgaactcagga

SEQ ID NO: 9288 - DNA, 201 bp, Homo sapiens
agcatgggaataatactaccctaactcatgactccactgcaataattacaagaggtagtttaggtaaacattctagctcgatgtggttgtttaacaaagcrtagtttttattattagttgtagatgttcactgtagagtttttaagcactgcctgatactcgattatgtggatgtagttggatttgtccaacctgtgtctg

SEQ ID NO: 9289 - DNA, 201 bp, Homo sapiens
gaaagaaacatgacattaaagtggggaaacttttagtgctcatgtgatttgccacattccttcctcctaccctctcgtgctcctagatggtggaggcgccrtcagcctagtcctggtgtaaggaggtgcgggtcggagctcctagtcaactcacgatgaacacgtagtatgaatgagaggtaacctctgttgtttatacta

SEQ ID NO: 9290 - DNA, 201 bp, Homo sapiens
gcctgcctcggcctcccaaagtgctgggattacaggcgtgagccgctgcacccagcttgttataattttcatcacaatgattgctgttccagacactgctraatactttccatacattgtcgttagttctcataataacttgatggagatttaggaaacatttcgaggtaaaggaattgagggtcaggtgggctgctgtag

SEQ ID NO: 9291 - DNA, 201 bp, Homo sapiens
aaagttctggctcttctctttctcccccatctgaatgagatttgggggcagtagagtgaaagtcagagacagtgaattggaggttggggccctagcctgcytttgcttcttctctcccctgtggggctgctcttcttggtatcctcactgcctcctcattcaggtgtgtggctgtgaaatgagaccagatctgcccaggag

SEQ ID NO: 9292 - DNA, 201 bp, Homo sapiens
aaaatgtgtctcagagctttattaggaagtgtatgtgaataggctcctttaccaacactgtcctccccacggagttggggatggaagattatccccacttytacaggtgaggagacatcccagagaggttaagacagtttccccaagagggttattggtcaagcctggattgaacctggcttcctatacctggcccacttc

SEQ ID NO: 9293 - DNA, 201 bp, Homo sapiens
atcctggatcccttgagtcaaggagtttgagaccaatgtgaacaacatagtgagaccctgtctctacaaaaaataaaatattagccaggggtggttgtgcrcacctgttgtcccagctactacagtggctgaggctggaggagcacttgagcctgcactgagctgtgatctcaccagtgtactccagcctgggccacagag

SEQ ID NO: 9294 - DNA, 201 bp, Homo sapiens; identical to SEQ ID NO: 1004

SEQ ID NO: 9295 - DNA, 201 bp, Homo sapiens
gagacggacgtatcgcttgagctcaggagttccagaccagcctgggcgacatactgagactctgtcttgtataattaaattaaaatttaaaaaaagaagarataaagacccgtgtttaaaatttttaaaaaaggggggaaagtgtaatgcaaaatgtggactatgccagctatgattgggaaaaataatttttcatacagc

SEQ ID NO: 9296 - DNA, 201 bp, Homo sapiens
ctggccctcagcctcctgcctattgccatgctatccacgcggcctttcccctagccaggtgtgagtcagagtaagtacctttgtctcagatctctcccggkagtccccgctagctgagagcagagcggtgttcctcaaggtctccttgacaaaccttgtttactcttaggctcgatgaccagccgaaagcagatgtgttgg

SEQ ID NO: 9297 - DNA, 201 bp, Homo sapiens
acaaaaattagccaagagtggttgtgtgtgcctgtaatcccagctactcaggaagctgaggtgggagcatggcttgaacctgggagataggggttgcagtragccaagatcataccactgcactccagccttggtaacagagccagatgctgtctccccaaaaaaaaaaaaaaaaaaaaaaaaaaaaaaaaaaaaagtgag

SEQ ID NO: 9298 - DNA, 201 bp, Homo sapiens
cagagccccttcctgagacacagctgtgtatgcagaagcaggtgctgtggaggctgcgtccttgcaaaatttatggaagggcccaggctggtccttgtggragtgtctggggaacatgtggcagtccactcaggggaaaatcagcctctctgggggtgctgggtttcaagcacggtgtctctttggggagaggaaagcaat

SEQ ID NO: 9299 - DNA, 201 bp, Homo sapiens
gggggccaaggggctctgggatggagccaagactcccagttgccctggagctccatgggaaaccttctgtggctgggccttggcctcccagctggtgcaarcatgtgcctgtgtccgccctctgcaggttctccaccaagtcctggctgtcgcaggtctgccacgtgtgccagaagagcatgatatttggagtgaagtgca

SEQ ID NO: 9300 - DNA, 201 bp, Homo sapiens
catcccatttccctgaagcctgctcatctttctgaacattttctggccctcacattcctctgcgtgttgtctcttttgtacacatgagatcaggccagacrtttggttcaggaacctgctctttccccttaaagacctgtatttccatggttacaaacactgctaccaagaacatctttgtgcacctgtgtatttctacag

SEQ ID NO: 9301 - DNA, 201 bp, Homo sapiens
gaaagtcatggcatctgtcccctctttccaggcaagaattagacatagcacgctcacttggctgctggtgcccactgtggtgggcactgcagggaggtaamcctgcctcccagaaccactgtccagtggaagcaggatggacctgcatggctgtggccatggttgacccaggcaggacctgagatcctatgggtatctaga

SEQ ID NO: 9302 - DNA, 201 bp, Homo sapiens
atttgttgtctgtggtctgtctgctccccctgggatgcgagcaccatgagacacggccttgctgtttgggtttgtttgccacaaaatccccattgagtgtygggcccaatatggcagttgcttggttgcgacagatataaaaataaatacctatttatttactgaataagtagatttcatcatgacatggtggatgtctcc

SEQ ID NO: 9303 - DNA, 201 bp, Homo sapiens
tgctggaaatgcctccttattgcagaaagtttaaaggaaaacgctttcagtaagtcaatacattgagtcccttctgcaaaagttgttttctacacttactrtgtaccaaccttttcattcctgcccctaaagtgcttgagatcagtgctttttactgtaactgaaggtgatgagcataatggtgtttaaaacaaagactgt

SEQ ID NO: 9304 - DNA, 201 bp, Homo sapiens
tgttggccagaatggtctcgatctcttgaccttgtggtctgcccgcctcggcctcccaaagtgttgggattacaggtgtgagcccccgcacccagccgcawccattcatttttttaaaaagatttctgatctgccgttgaatctatggatgcagaacccacagatcctaagggctgtctgtacgcataaagcacttaaagc

SEQ ID NO: 9305 - DNA, 201 bp, Homo sapiens
agatgattcactggaaggagggagatgaccgtgttcttattgactcaggtcctaccttttggagggaggtggcaaggcagggaaaacctcttggtggcctygcatcctggacatcctgggtgcctggtccccagcccctgctgcagggcctgctggagcctgcacatctcccacccagcacctgccccgggaagtatgtgc

SEQ ID NO: 9306 - DNA, 201 bp, Homo sapiens
agtggcttccctcctgagtgtttgtttagacgatcatccctggcagcagagaacccatccaaaggcccacaggggatctgcagctccctgttcttcccacygtgatgtggattcgggttcactccacttcctgaaaaggcagggcctgggttgttttgggggatgggaatttagacccctggagtgagttccatggggctg

SEQ ID NO: 9307 - DNA, 201 bp, Homo sapiens
gtgctgggattacaggcgtgagccgctgcacccagcttgttataattttcatcacaatgattgctgttccagacactgctaaatactttccatacattgtygttagttctcataataacttgatggagatttaggaaacatttcgaggtaaaggaattgagggtcaggtgggctgctgtagcagagcatgcagactttgca

SEQ ID NO: 9308 - DNA, 201 bp, Homo sapiens
agtccttcctgaagcctagctttgttgaccactttctcatttcttttctccgtggtcttttgatcccaacaggtagttttcttttggttgtttgtgctttrttttggcttttgctgtattctcttgcaagcatttctcaggtgccgagtcactttttgctggctgtttcagtctctgagtttggcctccacaacacaatcg

SEQ ID NO: 9309 - DNA, 201 bp, Homo sapiens
ttattttggcaggtaaatgtggttcagaagaaagctcttcgtctttctccaagcctgagcaatcgttttggcgcaggcagtccagagtagagcgctttgtragccagctacagaagtgctgtaagccccttcccactagatggcagcccctaaacccacatacaaatcctggaacctccctggtccccatcttccagggct

SEQ ID NO: 9310 - DNA, 201 bp, Homo sapiens
gctgcactgcatgtcttcccttttccttgtctcaggcacagctagccaggtttatgggttatctgggtgcaaagaagaatcacttcaagttctgcacagtyctacccatgggcctgctttgggctgtctagcggggatctctaccggcctttaaaaaaagaaaccgcttgctcctcttctagggaagctgtcctggctttt

SEQ ID NO: 9311 - DNA, 201 bp, Homo sapiens
ggaagggtcggggataggaaatgagatgggagggagctcagaggcggggccctgccccgctcccagtcatttggatttgcacactatggctgtttcaagckgccccctgtcccacaagttacgtctaaaagtctcagcttcatattctggcagcagctggggaaatgatttcagagcctgctggcatggagccattttttt

SEQ ID NO: 9312 - DNA, 201 bp, Homo sapiens
tgtgctcctctctccctccatgcttgtgcatctgtgctctgcccctcctcccccatccatgctcctcccttcatccgtgctcctccctcatcctggagtgscagacccactgccaatcttatgtgagttcacataacccacatcaataaggcgagagcagatgggtggctgggttcccgttctcgctgcagcatcccaggt

SEQ ID NO: 9313 - DNA, 201 bp, Homo sapiens
acttcacctcaatgagcctcagtttccctcatctctaaaagggagtgttggtggtgataaaacttattcactgaagagttataaggaccgagtgagtagaygtaaaaaggcttggttgccaataaagcatgaggtaccagcatgagtggtcattttgtgtagtttaatggatggtttttagacacgatgaaattggaaaga

SEQ ID NO: 9314 - DNA, 201 bp, Homo sapiens
cttctgccctcactctggctttgccttctgcctctccagcctgccttcttcctcatctggaaacatcacaggggcagctgactgagccatcctcagaggcsaggagcaagctagaggaccaagcgaggcgaggggaaccacaccatgccactgggctagcctggcctgctcctgtgttgatggacatagatcagggagatg

SEQ ID NO: 9315 - DNA, 201 bp, Homo sapiens; identical to SEQ ID NO: 1006

SEQ ID NO: 9316 - DNA, 201 bp, Homo sapiens; identical to SEQ ID NO: 1007

SEQ ID NO: 9317 - DNA, 201 bp, Homo sapiens; identical to SEQ ID NO: 1008

SEQ ID NO: 9318 - DNA, 201 bp, Homo sapiens
tgtcagccgccctgggtagggcagggggctcatgggtggccaccagcctctgcctgttctcccagacccttctccaccctttcccctcccctgcaaacagyagagaggagagccagccccttccctcatcacattgcttgtgtctgcctgagctcctctgtagtgtgcttgggcctgccatatggttgggctgcagatgaa

SEQ ID NO: 9319 - DNA, 201 bp, Homo sapiens
gcctgtccttgccaggtccatctggggtagggctgtcccagcccagtaacaagtccctgcctcccaagccggtacctgcaattccgctcctccctcctgcrttggccgttctgtgtgtgtgactcacctcctcttctgtttaaagctgcctacttcattcatcatagacagcagtttatctttccaggtgagtcctttgca

SEQ ID NO: 9320 - DNA, 201 bp, Homo sapiens
ggctctggtcagaggccggcccagccagcagctggcccctgccactcagcaggaggccagcctgaggctgaggggctcccggcccagccgactgctcaccrcctctctgcctgtccctctgtccccttaggagatcccccgagacctcacgctggatgccctgctggagatgaatgaggccaaggtgaaggagacgctgcg

SEQ ID NO: 9321 - DNA, 201 bp, Homo sapiens
acaggcctgggtacgtggggcctgccaccctctcccttgcctggcctggtgcccttggggctgtggccttcactatggtgggtgatggagcggggcaagcrtggcccagggtttctggggcagcctggaaaggccagggttggatgttcacagcctcctgagaagctctcccagggtcctcagggctctggatcctggtgg

SEQ ID NO: 9322 - DNA, 201 bp, Homo sapiens; identical to SEQ ID NO: 7048

SEQ ID NO: 9323 - DNA, 201 bp, Homo sapiens; identical to SEQ ID NO: 7049

SEQ ID NO: 9324 - DNA, 201 bp, Homo sapiens; identical to SEQ ID NO: 7050

SEQ ID NO: 9325 - DNA, 201 bp, Homo sapiens
ctgagccagtgagtgagcccagtgtgctgtccagcacccacatcccgatgtagctttgtttttctttactcaatgttgaatacacagtacatcccatcagmagtctggaagggtctgtagtattttcagttacacatgattgtattttgtggagggaatgatgtgctttagggacattgccagctttgggtttgtgtgtga

SEQ ID NO: 9326 - DNA, 201 bp, Homo sapiens
acctgtaatcctatcctggatcccttgagtcaaggagtttgagaccaatgtgaacaacatagtgagaccctgtctctacaaaaaataaaatattagccagkggtggttgtgcacacctgttgtcccagctactacagtggctgaggctggaggagcacttgagcctgcactgagctgtgatctcaccagtgtactccagcc

SEQ ID NO: 9327 - DNA, 201 bp, Homo sapiens
gctactacagtggctgaggctggaggagcacttgagcctgcactgagctgtgatctcaccagtgtactccagcctgggccacagagcaagaacttgactcaaaaaaaaaaaaaaccagcaagaaaaatccttgcagattttgcattctgtgccactatccattggttttcatgtcaagataatgtaaaaattctttacaat

SEQ ID NO: 9328 - DNA, 201 bp, Homo sapiens
gaaaaagtctccattcaaactgctgtcacatataaaatctatttatgtaagtctgtatttttctgttgtcttggccttggtgggcagtagtgtgttttaamtgagcaaactgtctttccaaataatgaagctgaagtcagcctacctgcttgccatttttcttccccttccatttttctaatctccggataattgtaagaa

SEQ ID NO: 9329 - DNA, 201 bp, Homo sapiens
cctttagtttaaaatgctcattatatcagagagctatgttttgaggtcaagttccctgtgctccatcaggtgaaatgcctaggtctgagtttatgttttgtttttttttttttttgagacggagtctcgctctgtcccccaggctgtagttccgtggcgcaatcgtggctcactgcaagctctgcctcctgggttccattc

SEQ ID NO: 9330 - DNA, 201 bp, Homo sapiens
gtctttatataggcgctttatttttgttcctattctgaatttgttttcttgggataattcccaggaatggaattactggatcaaagagcatggagatggaktgtgtgtgtgtgtgtgtgtgtgtgtgtgtgtgtgtgtgtgttaagacttgccaaactgttctcccatttttttttttttgaggcggagtatcgctctgtt

SEQ ID NO: 9331 - DNA, 201 bp, Homo sapiens
ctttcttcttctctcctttattctccccattttttgaccttgttagatattccttatcttgaatttgctatttctctcttctgtgcattcattcagtgacttttttttttttaaatttcagacagagactcaccctgtcccccaggctggagtgcagtggcacaatcttgggtcactgcaacctctgcctcccgggttcaa

SEQ ID NO: 9332 - DNA, 201 bp, Homo sapiens
ggtggccattcgcagaaaggaggctgcaaagcaagaggtgggggcttctggctgagcaggaaggtgggagaggggcatccttgtgaggagcagcctgtagkgctggggtttgggcagcaggcaggcagaggactttatctgatcacctcaaataattttgcctctgcttggaagggttctagctacaaaggcaacatagca

SEQ ID NO: 9333 - DNA, 201 bp, Homo sapiens
tcaaataattttgcctctgcttggaagggttctagctacaaaggcaacatagcaggtagtgcttgggtgtgatggtgataggcacagcggtattttaaatrctggtggtacattttaggagaaagaaggtgacgagtccctggggagagtccctgtggtggccatgactcaccgtggcacaggggacagaacagaacaagg

SEQ ID NO: 9334 - DNA, 201 bp, Homo sapiens
ggcagggggcctggtttgggggttcaagcccaggccacttgagcttttgagacgaggctccttgtttttctttgcttgctccatctgccactttccctttyctcttctcttttgttctttctccttttctctttcttcatcccctctttagactacaattcctggtaaccctggctcattcttccatccgtgtgtacaaaa

SEQ ID NO: 9335 - DNA, 201 bp, Homo sapiens
agtgattctcctgcctcagcctcaggctgcagaaatttgcataattaagtaagagttgaattttaatagctgagacaatggagaaaatgtctccagggcaktgcagagaccttcgtggcagcctctcccatcacaggcctggaggcctaggaggaaaaaatgctttttggagggcaagcccaggaccctgctgctgtgtgt

SEQ ID NO: 9336 - DNA, 201 bp, Homo sapiens
cggtgctgccccaccagggctcttcctgaccgtggttatcccagtgacctctggcacgtcacttcacctcaatgagcctcagtttccctcatctctaaaagggagtgttggtggtgataaaacttattcactgaagagttataaggaccgagtgagtagacgtaaaaaggcttggttgccaataaagcatgaggtaccagc

SEQ ID NO: 9337 - DNA, 201 bp, Homo sapiens
tacagactcagaaaagtacacaaaacataaatgtacagcttggtgaattatcacaaagtgagtacccttgtaaccaccgtccaagagaaggaaccctgccrgcgcccccggaggctccctgatcatgacctcttctcttactgccacgcacaacattagcttgactttagtagtagttgcctccctgcttcttaaaataat

SEQ ID NO: 9338 - DNA, 201 bp, Homo sapiens
ctaactttctggaagtaccaagcaataggctttcccttacatttcactggttagaactggatcacatggcaaccactggttgtcagggtggctgggagctragcacattgttatttgaacaaaatcagggattcccgaggttaaggaaggaaaaggaggatggacatggggaggcagctaacagcaggtgccatgattcac

SEQ ID NO: 9339 - DNA, 201 bp, Homo sapiens
acctgatgagagagatcaatccattgttggaacagacgtcttcatgtgcctttgtcctcgctccctttctgtgatagtgcagagtagagtctccctccccytcctcctcctccccctttcatcctttcttccttccatcattttcatatctgattacaagagtaatatatgttccttgtagaaactttgaaaagcatgaaa

SEQ ID NO: 9340 - DNA, 201 bp, Homo sapiens
ggagcaagcactgtgttggcaggagtcgggaaagcttaaggctgcgatgctcaaaggagaggataaatggtggacactccctagaccctcctccctctccmccaaaggcatagccttcatagtgctggaaatgttccatatccctccattgtgccgtggtgggaaaaagacagggaaagagccctccagggaactggcatt

SEQ ID NO: 9341 - DNA, 201 bp, Homo sapiens
caagcactgtgttggcaggagtcgggaaagcttaaggctgcgatgctcaaaggagaggataaatggtggacactccctagaccctcctccctctccaccaraggcatagccttcatagtgctggaaatgttccatatccctccattgtgccgtggtgggaaaaagacagggaaagagccctccagggaactggcatttgtt

SEQ ID NO: 9342 - DNA, 201 bp, Homo sapiens
acatccatatcaggagcacagccctgggccagctgacttagtacctctggggtgggaattggcccaggcatctctatatgtatacccgctccaagtgattytgatacacagggagggtggaaagcccctggttaggatacccaagctgaaaggactgctcaggagttgcttgttccacccttcagtttacccatgaggaca

SEQ ID NO: 9343 - DNA, 201 bp, Homo sapiens
gaaagtctctgtcttgcaagaggagacaccatagatagaaagcaatgggtgcaccactctgaatgctggctgcccagctaggttgctttttgcagggtggyctgtcctcaggcagcagccagacaacattttggggagagtagctcaggggattcctgtgtttctgctgtagctagttcagggtactaagaaagaaaaaaa

SEQ ID NO: 9344 - DNA, 201 bp, Homo sapiens
aagttccttgtcttgcaagacatgaccagtttggaggggatattagataaaatagagttcaaataacagtaactcaagcaagttaatttttctcacacataaaagaagtctggatgtaggtaacccaatgtcggtgtggtgggtccacaaagtcattaggaactcaggaaccttccagctcacccttctgccattccttat

SEQ ID NO: 9345 - DNA, 201 bp, Homo sapiens
agttccttgtcttgcaagacatgaccagtttggaggggatattagataaaatagagttcaaataacagtaactcaagcaagttaatttttctcacacataaaagaagtctggatgtaggtaacccaatgtcggtgtggtgggtccacaaagtcattaggaactcaggaaccttccagctcacccttctgccattccttatc

SEQ ID NO: 9346 - DNA, 201 bp, Homo sapiens
gttccttgtcttgcaagacatgaccagtttggaggggatattagataaaatagagttcaaataacagtaactcaagcaagttaatttttctcacacataaaagaagtctggatgtaggtaacccaatgtcggtgtggtgggtccacaaagtcattaggaactcaggaaccttccagctcacccttctgccattccttatcc

SEQ ID NO: 9347 - DNA, 201 bp, Homo sapiens
ttccttgtcttgcaagacatgaccagtttggaggggatattagataaaatagagttcaaataacagtaactcaagcaagttaatttttctcacacataaaagaagtctggatgtaggtaacccaatgtcggtgtggtgggtccacaaagtcattaggaactcaggaaccttccagctcacccttctgccattccttatcct

SEQ ID NO: 9348 - DNA, 201 bp, Homo sapiens
acaggccggtggcctccagtatctctgcaaaggggcttgtagagcatgaaactggtaagatgctgccccaggaattggggaagagcaaggaattagatagratcaaatcaaagagctgctaagccagaggaagtaggtcaaaacctaaaactttggatgtccccaacccacctgcacattgagttttctccagtagcaatt

SEQ ID NO: 9349 - DNA, 201 bp, Homo sapiens
cggcaggaaaaggcagggagggggctctgggttcctggagtggcagtggtggtgtggagttcaagcagggttatattacattatgctgtaaggtggaaaasggtggggcacattttagaaatattcccattagaaatggtaagaaagaaaaaatcttatgcccatgaagttgtaaatgtcagagcattgtctcatcattac

SEQ ID NO: 9350 - DNA, 201 bp, Homo sapiens
cagactgcccctattgccaggaatatgccttttgtgggtctgtgctgtgtctgtgcagaggatgggatgcactctttcaccttgcacaaaggcactgcatgggttggttctggctctggctttgggcaagttgcctctgtgcatcagtttcgttggagagaataaatgagttaccgcatgtaatgtgcttggaacagggcc

SEQ ID NO: 9351 - DNA, 201 bp, Homo sapiens
tttcttttcttttcttttcttttcttttcttttcttttcttttcttttctttctctctctctctctctctttctttctctttctttctttctttctttctytctctctctctctctctctctctcatggttcttgtatgaattctaattaagagacattacattcagaattatagcactcatggtgataattttcagaaga

SEQ ID NO: 9352 - DNA, 201 bp, Homo sapiens
cactctcgctctgtctgctggattttggccacaatgcacctcattcatttgtatcagttgcaattgtaagatggacatttgttgatcatgttcagtcctcrtgcatcttttttaaagcaccttcctgagagattttgctcatgtagtttttattggctgttattctgacagctgaacacgagggttcaggttgagaggtcc

SEQ ID NO: 9353 - DNA, 201 bp, Homo sapiens
ccgcctcctggcgattctcctgcctcagcctcccgagtagctgggactacaggcaccagccaccaagcctggctaatttttgtattttagtagagatgggkttttaccatgttggccaggctggccttgaactcctgacctcaagtgatccacccaccttggcctcgcaaagtgctgggattacaggcgtgagccatgccc

SEQ ID NO: 9354 - DNA, 201 bp, Homo sapiens
tttttattatttttgagatgaagtctcactctgttgccgaggctggagtgcagtggtgccatcacggctcactgcgacctctgcctactggggttcaagcrattcttgttccttagcctcctgagtagctgggattacaggtgcgtgccaccatgcctggctaatttttgtatttttagtagagagagggtgtcaccatgt

SEQ ID NO: 9355 - DNA, 201 bp, Homo sapiens
ggggatagtaataacacccacctccccagatgaaatgagttagcattttatacacttctcaaaacagtccctgtttgttaaataaaaatagggaaccagcrttaccagctagaccactcgctcacagcaggttgaacccaggacttctgccatccagtatgggggaaagagtgctggacagaaccaggagaccgtcctggc

SEQ ID NO: 9356 - DNA, 201 bp, Homo sapiens
cacagcaggttgaacccaggacttctgccatccagtatgggggaaagagtgctggacagaaccaggagaccgtcctggcactgccttctactttgtgtgastttgactaagtcgttgtccctctctgggcctcagtttcctcatcagtttttcatctatttctgtgagatgaccttaggcccttcttgtcttagaacatcc

SEQ ID NO: 9357 - DNA, 201 bp, Homo sapiens
tctggtcctgctaataatcctcactggttgacgtggtccttagatggggccaattgcaaaggtcagagggcaggagatgcagagccctgtggggtttgccyggtttttctcagtgcgggtgagctatcctccacctggagggttatggtagctgggtcacctgggaacaggccgtgggagaactggcctccttgggaatgt

SEQ ID NO: 9358 - DNA, 201 bp, Homo sapiens
ttttagtagagacagggtttcaccatgttggccagaatggtctcgatctcttgaccttgtggtctgcccgcctcggcctcccaaagtgttgggattacagrtgtgagcccccgcacccagccgcaaccattcatttttttaaaaagatttctgatctgccgttgaatctatggatgcagaacccacagatcctaagggctg

SEQ ID NO: 9359 - DNA, 201 bp, Homo sapiens
ggctgacaatgagtgttaatctattatagcaggcctgatgtcttcagcaatagacatccccctcttcccccattttgcagataaggaaactgaggcagagrgtggttaagtaatctgagttaaagcagctagtcagtggccgagctgggatttgaacccgggtctgttggcctctaggccccagcacctgactatccatca

SEQ ID NO: 9360 - DNA, 201 bp, Homo sapiens
ctcttcccccattttgcagataaggaaactgaggcagagggtggttaagtaatctgagttaaagcagctagtcagtggccgagctgggatttgaacccggktctgttggcctctaggccccagcacctgactatccatcactatactgcccctggctggcattcctgggattatacagcagcggcatcctgttgcctgagc

SEQ ID NO: 9361 - DNA, 201 bp, Homo sapiens
atggacgcttagacctgctgtctgttgctttgcctttcctagccctcggtcaggtgtctgtgcggacacatctgttcccccaacttgtgtgggttcctgaraattatggacccctgccgcttacgaccgttgtccttggagtccaacggtgccgggcattgggaagaggtttggttgttgaatgactggatgatggtcaga

SEQ ID NO: 9362 - DNA, 201 bp, Homo sapiens
ggtgctggtgagctggaagctggtccacaactgcacctgccacaggaggactaaataaaacaagaggcaagtgatggacgaatggagtggctgtccagttrcttcgtgtcactctgtaaagcatactaggatcttcttaaaagggatggcctcaggttataggcagcatgatggctagttttaatgaatttaatgctggct

SEQ ID NO: 9363 - DNA, 201 bp, Homo sapiens
atgtgctttagggacattgccagctttgggtttgtgtgtgaagattgggacatcagtcacccttgtgctatcagggatctactctaattcctagcctctgraattttcactgacaatccaggtagaggaagtgatatggtaccatacataaggaaaagattgttaacactactaggttgacaaatgagtattgacatgatt

SEQ ID NO: 9364 - DNA, 201 bp, Homo sapiens
atgtattatattttctctgctttacagagaaggagactaagatgatatgatctagatcctgccacacagctgatgtgtgatggtgcgaggggtagagcctyctggctgccaaacccaagcttctcgcagaggagatgggaccactaactaatggtaggcatgacctctgaccagtcagaacaggtgctggtggtaaacagg

SEQ ID NO: 9365 - DNA, 201 bp, Homo sapiens
gacctgcagggtaggggtgtgaggcctccatgttcctggggatccctgcagttctgggggctgtgtcctttacctgaagaagtctctttcctcagtggcaygtgcttctccttggcacagtatctgctcaaccaggcccgtgctctccagggatgtctgacaagcctcaccaccatccaagtgatactcgtggagcctcca

SEQ ID NO: 9366 - DNA, 201 bp, Homo sapiens
tttgagtttgcacagctgtttgatttatagtcctgtctctggtcagccctttgaagtggtggtttcagagccgcgtggaatggagggaagggctggctgtragaaacatggggataagaaccacacattttcttcctctggcactcctgagcatatgttttatgccaggtgctgtagtaggaactggggatatgagggaaa

SEQ ID NO: 9367 - DNA, 201 bp, Homo sapiens
gggggaaatttcaaaaacgctgatgtggtagcagtggtttcattattatgggtctcatttcatgctcacatctctctagccacaggagttcttgacctggygtctgtggatagaattcagggggtccatcgatgaacgtagatggggaagaaaattgcacttttattttcattaaccttaactggaatttagcatgtcatt

SEQ ID NO: 9368 - DNA, 201 bp, Homo sapiens
agggggtccatcgatgaacgtagatggggaagaaaattgcacttttattttcattaaccttaactggaatttagcatgtcattccacttgattgtaggcartgaggcacagttatcttaacaaacacctgtgactcggtcaccagtaggaatcacagttgtggagctatctgaaaaagcagtttccacttgtcacaacttt

SEQ ID NO: 9369 - DNA, 201 bp, Homo sapiens
tgagaccccatctcaaaaaaaaaaaaaaaagataaagataaaaaaagaaataaatgaaagtattgttctttgaaagagatcatgggcctccctagatttcyaaaagggtctatggccccaaactggttataagcttttattctaattgaaaatttggagcctttctagatatttgaaattaaaaattattaattcatcatt

SEQ ID NO: 9370 - DNA, 201 bp, Homo sapiens
cctaggtgggaggttacccattctccccaaaccagcaggtcttccatattagcaattaccaactccctgaccccaccctggcaggaaagccttcttttttwcccgagacagggtcttgttctgtcacccgggctggagtacggtggtgtgatgatggctcactgcagccttgacctcctgggctcaagcgatcctcccacc

SEQ ID NO: 9371 - DNA, 201 bp, Homo sapiens
ccatattagcaattaccaactccctgaccccaccctggcaggaaagccttcttttttacccgagacagggtcttgttctgtcacccgggctggagtacggyggtgtgatgatggctcactgcagccttgacctcctgggctcaagcgatcctcccaccttagcctcccaagtagctaggactacaggcatgcgccaccatg

SEQ ID NO: 9372 - DNA, 201 bp, Homo sapiens
gacactggtatattacaatgaacgcaactccagactatgtaggtttgaccagtttttcctttactgtcctctctcttttctgggatcaatccagggcaccrcatggtttacattattttgatttatcatgtctccccagtttcctctgctctgtgacagtttctcagtcttcccttaatttcatgacgttgacactacttt

SEQ ID NO: 9373 - DNA, 201 bp, Homo sapiens
gataacaccttgttaacaggtcagtgggtgcacctgccagacctcttcacgcattttacagtcacttaaaatgacgtgcaaatttactcccttctctctcttttttttttttttttgtttgctgaaatgggatcatatgatagatatcattttgcaggtttgcagtcttaacgtcatctgtgttatccataaaaattcatg

SEQ ID NO: 9374 - DNA, 201 bp, Homo sapiens
tgaaggaatgtaccaaagtcactgcaggatagaggtcagggatgccagacttgaaaacaggactctttcaatatttgtctgtctgtctttctgttttttgtttttttttttttctttggaagggaacaaaatccgtgaagtctctctgtttccttttgctaacctgatagtgctgaaggacccccgcatctttgcagtcag

SEQ ID NO: 9375 - DNA, 201 bp, Homo sapiens
tgaataagctcttactgctggtggttcctgaactgaagatgcaggcggatctggtaaggggatttttgttgtgatcctgactggacatgtttctctttccsctctcctctacccttgcgttcctgtgtttaagatgaggccttctcccagagatgggggacaaagctgccttactcctgccaccattttggtttcccagtg

SEQ ID NO: 9376 - DNA, 201 bp, Homo sapiens
ttactgctggtggttcctgaactgaagatgcaggcggatctggtaaggggatttttgttgtgatcctgactggacatgtttctctttccgctctcctctayccttgcgttcctgtgtttaagatgaggccttctcccagagatgggggacaaagctgccttactcctgccaccattttggtttcccagtggctgggggtgg

SEQ ID NO: 9377 - DNA, 201 bp, Homo sapiens
gggatgaagcatggtcaggtacagagctgaggtcctacttccattcagttatttattcactcactcagtgtgtatttagcacctgttgtgtgctcggcacygttctagccactgaacatgagttcctgtccgtctggaactggcagacatcactttctccaatagatgaagtcattaatttttcttatcttgagccaaagg

SEQ ID NO: 9378 - DNA, 201 bp, Homo sapiens
gtcctacttccattcagttatttattcactcactcagtgtgtatttagcacctgttgtgtgctcggcactgttctagccactgaacatgagttcctgtccktctggaactggcagacatcactttctccaatagatgaagtcattaatttttcttatcttgagccaaaggtacccacttttcagggtgggggttcccctgg

SEQ ID NO: 9379 - DNA, 201 bp, Homo sapiens
aacagtggttttagcaaatccggttatgttactttcttactttctctttttcctttctcctttcctgtttcctttcctttccattttccttttctgttttyttgctgcccaggctggagtgtagtggtgcaatcatggcccactgcagcgttcaactcccggactcaagttattctcctcctccccagtagctaggactac

SEQ ID NO: 9380 - DNA, 201 bp, Homo sapiens
ctttccattttccttttctgttttcttgctgcccaggctggagtgtagtggtgcaatcatggcccactgcagcgttcaactcccggactcaagttattctyctcctccccagtagctaggactacaggtatgcaccactgtgcccagctatgtttttattttttagttgagattgggtctcactctgttgccccaagctgg

SEQ ID NO: 9381 - DNA, 201 bp, Homo sapiens
ttgacagctgagcatccttttgaaggttgtcccatgagccatcccaggcatctgctgcagttcatagggttcttcctgttggtctccataccactcacccraagcatgcgagaagctgcaggggcttgggggcagttggagttcatgtgggggtgggggttccccagatgattcactggaaggagggagatgaccgtgttc

SEQ ID NO: 9382 - DNA, 201 bp, Homo sapiens
gctcctcattcctgcatccccacctgtgtgcacccatgctaaccctgagacttgtcggagctgggactgggcatctctcaagatggattgggcatctcctrtgatggtctgggcatccatgtcttccgtttttggtttgtagttccatattttgttctttagacagaagctggggtgggcagtaattccttggaggcagta

SEQ ID NO: 9383 - DNA, 201 bp, Homo sapiens
ttcttgttcagtaaaaaggcagagaagtgtgttaaatcaagtttagcctagagctacctccttagatattttaagttcagcctaaaggtttttctgtataycatgaactataacaagtggaggtataaaaacactgtagactgcacttgtgccaatcaaatgtagccaactgttcgaatcttgttcaaataaggcaaagga

SEQ ID NO: 9384 - DNA, 201 bp, Homo sapiens
cctagtgacctcgtgcaggtgacataatctctctgagcctctttcttcatctgtcaggtggggccagtgaaaagttttgatagaaatcaggtgaggcagtmagtgcctctgcagtgtttggtgaggtttttttgttttttttttttaaatccttcctttcttgagccagtttgatttgaaatctctcttatctgattcaga

SEQ ID NO: 9385 - DNA, 201 bp, Homo sapiens
aggcattaaaataagcctcatgaatggaatcaggcctggtttttaattatctgaggcccctgtcttatctccgtctgcctgaggcttaaggaaggcaccarggtttatattctgcctggttttttcttcccagagaggatcgggcttaatttcctctctgccctcattgtatcaagtcctctgaacacggcacagtgtaga

SEQ ID NO: 9386 - DNA, 201 bp, Homo sapiens
aaagaaaggtgagtgaacagctgggcatggtggcccaggcctgtaatcccagcatttgggaggctgaggcaggctgattgcttgagttcaggagttcaagmccaccctgggcaacatggcaaaaccctgtttctacaaaaaatacaaaaattagccaagagtggttgtgtgtgcctgtaatcccagctactcaggaagctg

SEQ ID NO: 9387 - DNA, 201 bp, Homo sapiens
aggtgagtgaacagctgggcatggtggcccaggcctgtaatcccagcatttgggaggctgaggcaggctgattgcttgagttcaggagttcaagaccaccytgggcaacatggcaaaaccctgtttctacaaaaaatacaaaaattagccaagagtggttgtgtgtgcctgtaatcccagctactcaggaagctgaggtgg

SEQ ID NO: 9388 - DNA, 201 bp, Homo sapiens
gcccaggcctgtaatcccagcatttgggaggctgaggcaggctgattgcttgagttcaggagttcaagaccaccctgggcaacatggcaaaaccctgtttytacaaaaaatacaaaaattagccaagagtggttgtgtgtgcctgtaatcccagctactcaggaagctgaggtgggagcatggcttgaacctgggagatag

SEQ ID NO: 9389 - DNA, 201 bp, Homo sapiens
actcaggaagctgaggtgggagcatggcttgaacctgggagataggggttgcagtgagccaagatcataccactgcactccagccttggtaacagagccaratgctgtctccccaaaaaaaaaaaaaaaaaaaaaaaaaaaaaaaaaaaaagtgagtgaaggatggttgtctgtgctggtgaataggagatgaacattcct

SEQ ID NO: 9390 - DNA, 201 bp, Homo sapiens
actggataatttatataaaaaagaggtttacttggcttatggttctgcaggctctccaggaagcatagcagcttctggttctggagaggcatcgggaaggytccaggcatagcggaaggcaagggggagtgaggcgtcccacagtgtaggagcaggagcaaaagcaagagcgagagggggcagggaggtgccacacacttt

SEQ ID NO: 9391 - DNA, 201 bp, Homo sapiens
actcgaaggctggtgtagaaggaagtggctgttgatccctttcttcctggatcttttttcacaagccccagagcactttgctgttggatgctcagaatagcccctcgtcccaatgtttgaattttcttaaagtggagtttttccttccttcacacacccagcttccctttcctaactcttaaagattggtcaccccttcgg

SEQ ID NO: 9392 - DNA, 201 bp, Homo sapiens
aaactcctgacctcaggtgatcttcctgcctcagcctcccaaagtgctgggattacaggtgtgagccactgcgcccagtcatgcccatgtgttttggtggycttggctgctgatgggtggggtgagccccaggaggaagttgggacaagtcaacctcatggcagatgtgccagggagagctgcgggtgagatagattgttc

SEQ ID NO: 9393 - DNA, 201 bp, Homo sapiens
ggccacatggacttgcagctccctcatctgcacctcctcgggtctcttcctcactctgcttagggaaaacactttccttctttcccaggacacaggtcccrggagaaataaggtcagggtcatgggaaggagtcacaggagcttccctacatccagtgcgatgtcacatgagtcctgaaactggccgcatatcagagtccg

SEQ ID NO: 9394 - DNA, 201 bp, Homo sapiens
gcagaaggcaggaccacagtgagaatccagttctttccaatcctggcccggggctgaccctcagacctcacggtccattgcacaaatgtagccggaggggytgccctttgggtccctgggattctttggtaaagcaaacattatctgtctaattctttttttgtaagttcagatttgtcttgagctttttcaatatgggta

SEQ ID NO: 9395 - DNA, 201 bp, Homo sapiens
cttctttaccaggttgaagtgtcacaacaaatgtaccaaagaagcccctgcctgtagaatatccttcctgccacgtgagttttctgccttcctctcctctkccttctggatttgggtgaatctttagcttgacctgttccctggtgatgggttttccctcttttcaaacagtaactcggcttcggaggacagaatctgtcc

SEQ ID NO: 9396 - DNA, 201 bp, Homo sapiens
ttctttaccaggttgaagtgtcacaacaaatgtaccaaagaagcccctgcctgtagaatatccttcctgccacgtgagttttctgccttcctctcctctgycttctggatttgggtgaatctttagcttgacctgttccctggtgatgggttttccctcttttcaaacagtaactcggcttcggaggacagaatctgtccc

SEQ ID NO: 9397 - DNA, 201 bp, Homo sapiens
ggcatgacaccaccgtctcagatttgtggccagagggtggccttggggatcatatcttgagccactaggaggctttacatttaagttgtggtggtacagcygtgattcccagtcccttctcctttgagctaacacttcctgtgtgcttagtgtgtactggaaacttcttccattgctgtttcatttgagccccacaatagt

SEQ ID NO: 9398 - DNA, 201 bp, Homo sapiens
agtaacgctctgacataggtgttgatgttttatttttgtggttgaggaaatggaagctcagagaggtggaggaagttgcctagagtcacccagctaagtgrtggtggaagctggctgagaattccagtctgtctgcctccaaacccagtgctctttttggccacagggagaagctggagcttaggcctctctccctgcccc

SEQ ID NO: 9399 - DNA, 201 bp, Homo sapiens
atccctacagatagaaagtaatcattaaaacaagcacagttaaaaccaaaaagttactaagcttcatctggttatcacacttgcttaaggcttggagcttraagccctcactctgttgaatgggcaatgagccagtgttggagaggcattaaagacatagcagctcaggccgaggccttctctcaggcagagcaagatagg

SEQ ID NO: 9400 - DNA, 201 bp, Homo sapiens
ttcattcctgcccctaaagtgcttgagatcagtgctttttactgtaactgaaggtgatgagcataatggtgtttaaaacaaagactgtagctgtttttttyttggattgaacaggactgtcttgaagtcacagtattttggttactccaggcttttctattccctaagccagctccattagggggttgacttggagcatct

SEQ ID NO: 9401 - DNA, 201 bp, Homo sapiens
ccccttcctgagacacagctgtgtatgcagaagcaggtgctgtggaggctgcgtccttgcaaaatttatggaagggcccaggctggtccttgtgggagtgyctggggaacatgtggcagtccactcaggggaaaatcagcctctctgggggtgctgggtttcaagcacggtgtctctttggggagaggaaagcaatctcat

SEQ ID NO: 9402 - DNA, 201 bp, Homo sapiens
cgcagcctcacctggggtcttagagggcaccttctgatctttctgcccaagactttgttttttggggttttttttgagacagagtctcgctcttgtcatcmgggctggagtgcagtggcacgatctcagctcactgcagcctccgcctcctgggttcaagcaattctcctgcctcagcctcccgagtagctgggactgtag

SEQ ID NO: 9403 - DNA, 201 bp, Homo sapiens; identical to SEQ ID NO: 7058

SEQ ID NO: 9404 - DNA, 201 bp, Homo sapiens; identical to SEQ ID NO: 7060

SEQ ID NO: 9405 - DNA, 201 bp, Homo sapiens; identical to SEQ ID NO: 7061

SEQ ID NO: 9406 - DNA, 201 bp, Homo sapiens; identical to SEQ ID NO: 7062

SEQ ID NO: 9407 - DNA, 201 bp, Homo sapiens; identical to SEQ ID NO: 7063

SEQ ID NO: 9408 - DNA, 201 bp, Homo sapiens
ttcctcacctccctcccactgtcccttctcctgagtctccactgtccattataccagaactgtagattttattgccagagtttgaagctggtgcccttggkctttggagacgatttggtttaaatcctgagtgctatgatgctagttgtgttcattgattggactctgtatgttgaaccttaatttctgtcatccatcaaa

SEQ ID NO: 9409 - DNA, 201 bp, Homo sapiens
tatgtgaggtacatgataaccccagtctcctttaatcctcgtgaaaccctatgaagcaataagggactattattatccacactttatacatataaatgaaraaagtgaggctttgtgaagttgaatgatgttcccaaggtcacccagttagtaaatgctgaagctggagtcctcagtcttagttattaatgtaagcttgct

SEQ ID NO: 9410 - DNA, 201 bp, Homo sapiens
tccacctgagctgggtgatttgctcggatgcaggcagcagaggtttgttattagtgctctaagagaggcaatacggcaaacagccctgctctggagccagwctgcttgggtttgaatcccagctttgccactccctggctgtgtggtcttgagcaagctgcgatctccctgtgattcagttgctttatcagtaaaatgggg

SEQ ID NO: 9411 - DNA, 201 bp, Homo sapiens
ctttgtttggcttttaatatggctactagaacataccaagtacatctcttggatagtcttattctagagcgtgtagcctggcagctgctgtcctgccctaraaggggctatcttggcttcagaggggagaaatgaaacccatctgggtacctccctaatctcccacgtgcccccagtctcctgctccccaacctgccacct

SEQ ID NO: 9412 - DNA, 201 bp, Homo sapiens
tgtgaaggtggtacttattttggggggacacttggaagtcaccattaggaggccaccagagtcttagcaacatttcaggagctctccctgggtccctgggycacttggccgtagccaagccaggcaactccctggtcttctggcagtgagctcgtttccatctgtcgagcctaactggcctctgttgggaatgcgagtccc

SEQ ID NO: 9413 - DNA, 201 bp, Homo sapiens
ccagaagcatgagtggttctctgaaacccagttacttctcaccccttcatgtcggcagggtgttcagggggccgccagttagagggcacttgagaacatcraagggaccctttgtggagcacccctactgtgtgccccctccctcccagccagctcacacaccactaatggcagctccatttgcaggagatcctgtcggcc

SEQ ID NO: 9414 - DNA, 201 bp, Homo sapiens
gcaatacaggtgcgtcagtcccttctcacaggctgtaaagaaatacctgaaactggattggttatttatttatttatgagacggcctggagtgcagtggcrcgatcttggctcactgcaacctctgcctcccgggttcaagcgattcttgtgcctcagcctcccaagtagctgggactaccagtatgcaccaccacacctg

SEQ ID NO: 9415 - DNA, 201 bp, Homo sapiens
gtgttttttggtagagatggggtttcatcatgttggccagggtggtctcaaactccaaacgccttggcctcccacagtgctgggattacaggcatgagccwccgcgcccggccttcgggccctgtcttgataaagaaccaaagtgggccccaagctgcagttgaggagaaactcagcatgagttttctctcctgcagaagt

SEQ ID NO: 9416 - DNA, 201 bp, Homo sapiens; identical to SEQ ID NO: 7067

SEQ ID NO: 9417 - DNA, 201 bp, Homo sapiens
tggctacctgtcttattctttctgaacagttcctctgataaacagtgtattctttaactttctacttttaattaaaatatttacaaaatacataatgatayatgttcactataaaaaagaaagtactagatgtacaacagtgaaaatcacccataatgccacctctcagagttaattccagtgcacattttgttgtatatt

SEQ ID NO: 9418 - DNA, 201 bp, Homo sapiens; identical to SEQ ID NO: 7069

SEQ ID NO: 9419 - DNA, 201 bp, Homo sapiens
gccagacctcactttgccatttgctggctctgtaaccttggatgagtgacttaaccccaaaaccttgatttccttttttgtaaaatgcatctctcccaccsagggctgctcccccgaggattgaaagaggctctgtgtgcaaagagcttagctacagagctgctatatcttaattcatagtgagtgttctccaaacgttag

SEQ ID NO: 9420 - DNA, 201 bp, Homo sapiens
cctttggagcctgcctttgatctcggcagagaaggggtttcttcccatccccttgaagatccattggcccctttcgtgcccctagagcctggtagctgtgrcattggtctccccagcttctcctcggccatctgctcagggtctctgttgaggtcccatagctttgatgcctgttactgctgtggggcagaagttgttttc

SEQ ID NO: 9421 - DNA, 201 bp, Homo sapiens
tgccacagcaagaagggctttgctctgggggcagtcgggacagctgttctgctgactcttagctgctgcccgtatatcgagtcttcttgtcactccagccrccattctagtaatgctgaggctccctcgtccactgcagccccgccttgcgcatattccgagcatcttgcatttcacctgtgaacgttgtaccttgcactt

SEQ ID NO: 9422 - DNA, 201 bp, Homo sapiens
gccctggggccaccaatctccctgtagcactttggttccatgctggagtaacctttggttctggtcttcctggacgtgggacttttagcgccaaaactggsaacaccccaggctcagggatcagccccagctgcccactcttgggcccctgatatgtggcgtttcttcctctcccctgagagctgctccaccagtgaccca

SEQ ID NO: 9423 - DNA, 201 bp, Homo sapiens
tgccattccttatccttatgttcctagatggctgctggaggtccagctttcacatcagctttccagggagcaggatgaatgaactggagaaggatgtgtcrtgtatatattccttttgaaattaccatgtggcacttccatttatgtgtcattggccaggtattagtcacacagctacacctgcctgcaaggaaggatgga

SEQ ID NO: 9424 - DNA, 201 bp, Homo sapiens
ttgggggatgggaatttagacccctggagtgagttccatggggctgccaccagctagtttagatgagtcacttcatcccggaggcctcagcctcctcacckgcaaaacaaggaggctggagtggatctctgagggctctggaagctcgaaattctctaggttagagaaggagacttggttgggtgaaatcaaatgtttgtg

SEQ ID NO: 9425 - DNA, 201 bp, Homo sapiens
acccctggagtgagttccatggggctgccaccagctagtttagatgagtcacttcatcccggaggcctcagcctcctcacctgcaaaacaaggaggctggmgtggatctctgagggctctggaagctcgaaattctctaggttagagaaggagacttggttgggtgaaatcaaatgtttgtgattgtttttatactaccct

SEQ ID NO: 9426 - DNA, 201 bp, Homo sapiens
gtagcatttatggcacaggccaccactagggaaacttaacccctactggacccttgctagggaaacttaaccccctactttatgggttcagtaaatctggrttttagggaaaggtacttctgcagctgcctctcatttcatacaggtgggtgacacaagccaggaaacaatctcagcaagctgggtgggaccgtccaccgc

SEQ ID NO: 9427 - DNA, 201 bp, Homo sapiens
ggttgtccggggatagcttttctctgtgtggtggtccagtttggatggaaaagggtagaaggagctgagacttaacgtttgctgcctgtgtgcctagcagygtgcctgactcttctcaaactcacacacgttcctggagatcagcagttttcatcatacacattttccctctctaaatataaagggagggaggcacaattt

SEQ ID NO: 9428 - DNA, 201 bp, Homo sapiens
tggcttctagtttttgtggttacctgcagcaaaggggggccccctgggctgaccaattagaagaaggccttttccttgctccaagatagcggagggagggkctggatttcaggtctccctgtccagagactgatcagctttggtagtacataatcatatggtgaggtcttgatcacttgaggctcatgaaagtcactttaa

SEQ ID NO: 9429 - DNA, 201 bp, Homo sapiens
tgggtctgccgtgaactgcttttgtgacccagcgtcctgagccccagttttcttgtttgtggaaacaaggtgagggaattggactggctgatttcttctgragtctctttcaattctttaattctgtctctcatgggccaaactcacagagatagtaatttaagttcatagcacatacgtgccatattttagctgataagg

SEQ ID NO: 9430 - DNA, 201 bp, Homo sapiens
tggaacctgagttgatggcgggtctacagtcagttcagtttacttgtagctgtcattgatcaggtgcaaacatgcttttcaaagcctggaatcattttttytaagttggatcatatttgcttattataattggtaaaatttgagtgttgcccctaggctctcagagggaacagtttggaaagtgcttccttccaagaagag

SEQ ID NO: 9431 - DNA, 201 bp, Homo sapiens
gtgcaacccgtttgcccctgagatggccatcccccagggtccacaggcctgcgcatgcatgcttcctgtgactctgccccttctctgtcctcattaacccrggagggattagttcttcatccaagaaggtgcctgcctgcagtctccacctgagctgggtgatttgctcggatgcaggcagcagaggtttgttattagtgc

SEQ ID NO: 9432 - DNA, 201 bp, Homo sapiens
gtggccttagcttaaggtaatttaggtaacttaacctccccaagcctcagtgccatcgtctgtgaaatagggcatttgagaggatttgagtgaggctgcastgccgtccgttcagagcagatgctctcttgctggttcatttttccaaatgcatgggttgggggtatgatgtgcttggcagaagcctaccaagaatgctta

SEQ ID NO: 9433 - DNA, 201 bp, Homo sapiens
gcagcggcatcctgttgcctgagccctttctcatcccccgctaatgatagtgctagtaatgtgagtccagttacagctgtgttgcctgaggtgcacagggsctagggggataactgcgttgtctttagccattgcttgttagagaaggtggtcttgccttctttctccctcccagagctgatgtcacctaaaccctgctgc

SEQ ID NO: 9434 - DNA, 201 bp, Homo sapiens
ggcccattggcagaaatctacttttgccattaggtgcagcctctgcctttttcactaggcccctgcttggtaattcacacccaggtgcctttcagttggcratgtcaggaatactccaggattacctgttgtgattgaggggttgagctgagggggtaaactagttcgtggctgtgccctgtgggcctggtgaccttcaga

SEQ ID NO: 9435 - DNA, 201 bp, Homo sapiens
aggagagtgcgggtatgggccgggccgggagagggctggctgttgcgaaatgcccagctcaaggattgaggtcacttgtactttctcctctccttgccccrctttccctgtgtgcctctcctgctctgtcccatgcccatgaatgtcagcccccgtgggcgcccttgagggctgggcagtgctgggagccaaggggctgcc

SEQ ID NO: 9436 - DNA, 201 bp, Homo sapiens
taaccgatttgttgtctgtggtctgtctgctccccctgggatgcgagcaccatgagacacggccttgctgtttgggtttgtttgccacaaaatccccattsagtgtcgggcccaatatggcagttgcttggttgcgacagatataaaaataaatacctatttatttactgaataagtagatttcatcatgacatggtggat

SEQ ID NO: 9437 - DNA, 201 bp, Homo sapiens
aggcatccatctggcagattggaagcggggaaggaatgaagcgtgtcctgacttctgtcagcttggggaaggaagtcagtgtaagtagtacctgccctggrtggagcagtagggctggaggtggggtggggcatgtggcatggctgcccttcactcacccacctgagaaatggggtcggtgaggagctctgccacctgcac

SEQ ID NO: 9438 - DNA, 201 bp, Homo sapiens
cagtcttttttttttcttaaagataatggttttcattgatttatgagatgaaaagaaagtaaagccccatgttatttacatgaaagaagataatttttttwaaaaaaatcactgctgaaaatacaaatagttgtgctatgctgtggtattaaatctttcctcataatgtttttcttgactattaagaacaaatcaaagttt

SEQ ID NO: 9439 - DNA, 201 bp, Homo sapiens
agtggcggggcaggggtgggtaggggagagtgggtttggcacctgagggtgtggttacacctggctgcaggatagggctcttcccaaagtgccctttggcrtctttggaggagtggaggctacacggtcaggatggccggaattcttcttttcctccttcgacattaaatccatctgcttgtcctgttgactctgtctcca

SEQ ID NO: 9440 - DNA, 201 bp, Homo sapiens
gatggccggaattcttcttttcctccttcgacattaaatccatctgcttgtcctgttgactctgtctccaaaacatgtcctctatcccctctatttcctcyctctcctccactctcacccggttcctgctccccacctggcctgggccaccgcagctgtctcaaaaccagagccatggctgtgcccttgcctccctaccat

SEQ ID NO: 9441 - DNA, 201 bp, Homo sapiens
cttgtctttatacaaggctctgtgtgtgagtgtgactgtgggtgtttatttaactcaagaaaagtccaagggacccctcacacagaggaggtgaggtgcaytggacaacctgggccaggacttggaggacatgtctgccccgatgatgacttaggcccagtcccttagtatccttgggatatagccccctgatctgcccca

SEQ ID NO: 9442 - DNA, 201 bp, Homo sapiens
ggattggggggtatgaggggtaggtgggttaagctccatctcctctgggggtgtatctacacagattatttggaacttttctgtaggaaagagttgtcttwtctcctccgtttatttattcattcagtcatttatatcagtataggctcatgtctttttcttttacacattgggttctaatccaatactacatgatttatt

SEQ ID NO: 9443 - DNA, 201 bp, Homo sapiens
ctgaggttcagagagagggaggggcttgccatgagttgtacagcctgtaagtggcagaatggagatcaaacccaagtctgtctgacataacataatcctcrcgctgccctcctcttcatggggtggcctctcctgggcagtgctcactttctcgggactggcttctgagctcccaggaggcatggccagcaacacagggag

SEQ ID NO: 9444 - DNA, 201 bp, Homo sapiens
ggcatctcctgtgataacagtgccaccttctggatacctcctgaaggacctgcctgaggctagtttacagataactttttttttttttttttttttttggkaagtagaacaagtatactctaaaatcatgattaaaagactggatgtggtggctcacgcctgtaatcccagcactttgggaggccaaggtgggcggatcac

SEQ ID NO: 9445 - DNA, 201 bp, Homo sapiens
ctggccctgtttggtttaagcagtttcctggtctggcaggatttgttatcttagcacccagcttgtcaaagccgtagtgctacttgttatagcaaacaggyccctgtcaccctgtggctgcaagccaggcaatgcttatgttccaaaagtcagacctgctgttcttactataaagctctgctggaccatgggtggcttcta

SEQ ID NO: 9446 - DNA, 201 bp, Homo sapiens
gtatctttttttttttttttttttaaaggcagagtcttgttctgtcactcaggctggagtgcagtggcacgatctcagctcactgtaacctccacctcccrggttcaagcgattctcctgcctcagccttctgagtagctgggactataggcgcacgctaccacacccggctaatttttgtatttttagtagagatggggt

SEQ ID NO: 9447 - DNA, 201 bp, Homo sapiens
ttttcttttcttttcttttcttttcttttcttttcttttcttttctttctctctctctctctctctttctttctctttctttctttctttctttctttctytctctctctctctctctctcatggttcttgtatgaattctaattaagagacattacattcagaattatagcactcatggtgataattttcagaagactgt

SEQ ID NO: 9448 - DNA, 201 bp, Homo sapiens
gattcagccaggtttccaaagaaaaggactgtacacctctcgcttatcattggtctccctacttctggcagagtgcctggtgcctagcagacatgatatarcatttatcagagcctgaacttaattcattataaaatgctaatgtgtgcccagctcagagccagtcactgagtatgtgacggtcaccctggcctcatggaa

SEQ ID NO: 9449 - DNA, 201 bp, Homo sapiens; identical to SEQ ID NO: 1012

SEQ ID NO: 9450 - DNA, 201 bp, Homo sapiens
ctgctgttagaccatgggtactcagtgcagcagagtctctgtaaatggcagaggtggtgctttgcagatgggagaagggaataaacctgtagctgatgtcwggccctttgttgcaccctttataccgaatgaattatttcatttcactccataacacctctgaaataggctacactgttcccatttgacagacaccaaaat

SEQ ID NO: 9451 - DNA, 201 bp, Homo sapiens
catctcacccaggagtccagcctgtaggtcaagtatggcctgccacctgtgtctgtacaatctgcaaactaagaatagttttaactttctgaaaaactttycaaaaaaaatttttgtatacatagagatgaggtctcactatgttgcccaggctggttgcaaactcctgagctcaagtgatgctcttgcctcggcctccca

SEQ ID NO: 9452 - DNA, 201 bp, Homo sapiens
caacttaatgactttttcggtgtggctgggagtctcagtaggctctactgaggtgtggtttgaacggccactttgcctctcatataatggtcccagaaaaktatgctttttaaatcttgggtctgcttcgtagtttttttttttttttttttttcatttattccattattgctgccaggtcttgtggcctctgtgcattta

SEQ ID NO: 9453 - DNA, 201 bp, Homo sapiens
actgcttaagcccaagaggtcaaggctacagtgagccatgtttgcaccactgcactccagcctggataacaaaaggagacactgcagtggcacacccgccycccccccccccttttttttcttttttgagacaaagtcttgctctgtcacctaggctagagtgcaatggcgtgatcttggctcactgcaacctccgcctcc

SEQ ID NO: 9454 - DNA, 201 bp, Homo sapiens
tgttgcccaggctggttgcaaactcctgagctcaagtgatgctcttgcctcggcctcccaaagtgctaggattacaggcgtgagccactgcgcccggccarttataaactttaaggaaaaggacactttctaaaagtgaaatctcccacagagtcccgctctataaaacccataaagtggagctgctcttgatgagagtga

SEQ ID NO: 9455 - DNA, 201 bp, Homo sapiens
ttaatgataaaggggtcttttaaaatgcaagtcagctcttttgcatcatctgcagagaccattgactctcattccacttggggcaaaagccaaagtcaagkccctagcttctgtccttcaccccattgctcatcctgctccagccccttgggccaccttcctgttctcacatcccctagatgcccccaggcctcctcccct

SEQ ID NO: 9456 - DNA, 201 bp, Homo sapiens
ggtcagcgcctgcaggtacattgattgcttaagggcaatagttcacacatcacttttcttacattccagcacatatttgtacttttctactaaaatcagcrgggtactcttttctagttctgagaagtatttggcaggttttataatttcattgttttgcattttccactatatttcccctggccgccagctatcctgtaa

SEQ ID NO: 9457 - DNA, 201 bp, Homo sapiens
gatctgttcggtaactgcaactaacttttcttttcttttcttttcttttcttttcttttcttttcttttcttttctttctctctctctctctctctttctytctctttctttctttctttctttctttctctctctctctctctctctctcatggttcttgtatgaattctaattaagagacattacattcagaattatag

SEQ ID NO: 9458 - DNA, 201 bp, Homo sapiens
ctcatttgccagtcccctagaagtcaagtgtcacccaaggttaacgcagctttttggctgtggctcaccctcccacgttccatcctgacccacttttcctyttgaatgttctttaaacatttaaaaaatttaatgtattcattttgactcaagttctagtgtgggatcttgtggataatactgtttctttttttaaaaaga

SEQ ID NO: 9459 - DNA, 201 bp, Homo sapiens
atgtggcttggggacacttgaaatgtgtatagtgcagctgagaaactgaaattcgtgttttgttttatcgtaatgaattttaatttgaatagacatctggytatgactgcattgaccagggccctgtggtgagagctgggatgctgaagacaccttcctctgccccaggagcacacagactggggtgaaacaggaagtgag

SEQ ID NO: 9460 - DNA, 201 bp, Homo sapiens
aaatccctccaggattgtttagttcagcaatactcctccccacacccgtgttacagctgaggaaaggagtccccttcaacccccggcatttagtgattctrtcatgtcggcatagtttcttctctgacctggccatggtgcgtttgatgccaagaatgggcagcctgagtggtgatggtcagtcagtgccactctgtcagt

SEQ ID NO: 9461 - DNA, 201 bp, Homo sapiens
aacaatatatatagtatgatccttcttttaaaaaaccatatgtatatgtatctataactgtgtgtgtatctatacacacacatacacacatatacacacasatacacaaagcactctaatttttatgtttatttttttagaggtggagtctcattctgtcgcccaggctggagcaagtatagtggcatgatactagctcac

SEQ ID NO: 9462 - DNA, 201 bp, Homo sapiens
ctgtctccgctagaccctcctaggggtctgaaaactccaccgaggcaaacgggaatgttcttatgccccagtgtactcacagagggacacttggcctgccyaatagctgggcctgcaacctatgccagtaataattaccttcattcctttgaatctgcccagcgctggggagacaagggtgtgtagaagcagacacatgtt

SEQ ID NO: 9463 - DNA, 201 bp, Homo sapiens
agcagaggttctcaactagaggtaatttttgtcctccagggacatttggcaatgtctggagacatttttggttgtcacaatttggagagggagtttgccaycagcatctcgtgggtagaggccagggatgctgtgctgttcaacaccttgtgatgcacaggacctcctgcaacaaagaattatctgtccccaaatgttaat

SEQ ID NO: 9464 - DNA, 201 bp, Homo sapiens
ttcggtaactgcaactaacttttcttttcttttcttttcttttcttttcttttcttttcttttcttttctttctctctctctctctctctttctttctctytctttctttctttctttctttctctctctctctctctctctctcatggttcttgtatgaattctaattaagagacattacattcagaattatagcactca

SEQ ID NO: 9465 - DNA, 201 bp, Homo sapiens
tctgtaatcccagcaatttgggaggccgaggcaggaggattgcttgaagccaggagtttgagaccagccagactgacatagtgaaacctcgtctctttttwaaaaaaagttgtagtgggtaggagtgggcaagaacatggacttgaggagttccgcccatctgccaccttctaagccactgaggcctaggacctggctagg

SEQ ID NO: 9466 - DNA, 201 bp, Homo sapiens
cttccatgctgtgcctgttgatggaggctgaaagtgaaaagatgatgaacagtgtatacactactatagtagactgtaagtggtattagccactggtcagrtgattcactgggattacattttctttgtgggtccatctcttccacttcatcaattactcaaaggctcacaattttgttggcttcacatttggaccatggc

SEQ ID NO: 9467 - DNA, 201 bp, Homo sapiens
ccagccagacctcactttgccatttgctggctctgtaaccttggatgagtgacttaaccccaaaaccttgatttccttttttgtaaaatgcatctctcccmcccagggctgctcccccgaggattgaaagaggctctgtgtgcaaagagcttagctacagagctgctatatcttaattcatagtgagtgttctccaaacgt

SEQ ID NO: 9468 - DNA, 201 bp, Homo sapiens
ggtactgacaagcagattagttgcacgttgggaggtgggaggagggaggagacgaggagagtgtgtgtagcagatacgagtgggtggcttcaaaatagaamttcatgaaggctctaggaaagtaattttaaacactgttcatttagaggctgtggttcaggggtgagcaaagctggaggcagcccacccagcacatgttga

SEQ ID NO: 9469 - DNA, 201 bp, Homo sapiens
tccagatctgttcggtaactgcaactaacttttcttttcttttcttttcttttcttttcttttcttttcttttcttttctttctctctctctctctctctytctttctctttctttctttctttctttctttctctctctctctctctctctctcatggttcttgtatgaattctaattaagagacattacattcagaatt

SEQ ID NO: 9470 - DNA, 201 bp, Homo sapiens
ggctcagactaaccacatcagtaccacctgagaacctgatagaaatgcagattctcctgccctgtcctctgatctacaaaattagaaactatagaggtgarctccatggttctgggaattaacaagccctccaagtgattctgatgcatgttcaagtttgagaaccacaactagtttccctttcataatagttactacttt

SEQ ID NO: 9471 - DNA, 201 bp, Homo sapiens
gggcaagtgccctggtggtaggcctcttacgtgagaagttcttgctgggagggaccctggaatccatcccatccagcctcttggcacagagactgcaggcraccttttcaaggtcacactgctaggagatggcagaaggactagaatctgggtttatagaatggggagaggactttttgctaatgccttatgagcatatgt

SEQ ID NO: 9472 - DNA, 201 bp, Homo sapiens
tagctgataacatttcctctatctggatgtaccattattagtagtagttttttttaagcaatttcctcttgatagttacttagggtgtttccaatcttttkctgttaccaacaatgctgcaataatttttctggcttccaagaactgacattaattagaatgtgctatgagaagtcctattagctgagcatggtggctcac

SEQ ID NO: 9473 - DNA, 201 bp, Homo sapiens
atgccccagtgtactcacagagggacacttggcctgcctaatagctgggcctgcaacctatgccagtaataattaccttcattcctttgaatctgcccagygctggggagacaagggtgtgtagaagcagacacatgttgcctcatggagatttatgttccagggacattgtgacttgccctttcctgccagcctactagt

SEQ ID NO: 9474 - DNA, 201 bp, Homo sapiens
gaaaggtgagtgaacagctgggcatggtggcccaggcctgtaatcccagcatttgggaggctgaggcaggctgattgcttgagttcaggagttcaagaccmccctgggcaacatggcaaaaccctgtttctacaaaaaatacaaaaattagccaagagtggttgtgtgtgcctgtaatcccagctactcaggaagctgagg

SEQ ID NO: 9475 - DNA, 201 bp, Homo sapiens
aggggtgcaggtcagctctcatggagtgcggattagtcctacttggcaggcatggttcacccagtcagatctcataaatcccctacttctatcctaaaatwgaaaatattggcttttgctgctgtgtaaaaagtagcatgaattcattatatatagatactttggaaacagagaaggaaagaaatcacatacatactccta

SEQ ID NO: 9476 - DNA, 201 bp, Homo sapiens
gggagcatggcagcaaggctgcaaggccagccccagccaagtttgagatccacaggcagatcagggttcctggttagagaggcgcctcattctccagcagrgggagctgggcaccttcaccagcagctccctgtcaatatttatccattcttgccctgcttttctagaaacaaccggtcatgactcctttgtagaattcct

SEQ ID NO: 9477 - DNA, 201 bp, Homo sapiens
gaggttcagagagagggaggggcttgccatgagttgtacagcctgtaagtggcagaatggagatcaaacccaagtctgtctgacataacataatcctcgcrctgccctcctcttcatggggtggcctctcctgggcagtgctcactttctcgggactggcttctgagctcccaggaggcatggccagcaacacagggagct

SEQ ID NO: 9478 - DNA, 201 bp, Homo sapiens
aaatacaaaatttagccgagtgtggtggcgggcgcctgtggtcccagctactcgggaggctgaggcaggagaatggcatgaactcgggaggcagaggggcrgagggtgcagtgagccgagattgcaccactgcactccagcctgggcaatagagtgagactcagtctcaaaaaaaaaaaaaaaaaaaaggctcttgaccaa

SEQ ID NO: 9479 - DNA, 201 bp, Homo sapiens
ttccaacaatggaacgctaggcatacgtgggttgtcatctaaaacaggggacccatcccccaggccactgacaggtaccggtccacttggcctcttaggamctgggccacacagcaggaggaacgtgtttacagttgctccccattgctcgcattaccgcctgagttccgccagctgtcagatcagcagcagcattagatt

SEQ ID NO: 9480 - DNA, 201 bp, Homo sapiens
catctgtaatcccagcaatttgggaggccgaggcaggaggattgcttgaagccaggagtttgagaccagccagactgacatagtgaaacctcgtctctttwttaaaaaaagttgtagtgggtaggagtgggcaagaacatggacttgaggagttccgcccatctgccaccttctaagccactgaggcctaggacctggcta

SEQ ID NO: 9481 - DNA, 201 bp, Homo sapiens
ggttttcaaaaaccttcgccagagcaatccccctttttttcccgagtgaaatcttacatggaaagccaatgtataaataaggtgaaatggaagctgtactrgtaggaggatcaggggtgggggttacagaatgtaggcagcaaagacctggggggtcttcctgctggcttcctgagcctcattcttgtggtccagggagca

SEQ ID NO: 9482 - DNA, 201 bp, Homo sapiens
tgtgtgttttcttcttttgtatcagccaggataatgcagggtgtgttccaggcctctgtgattaaggtttcagtaacactctgatgtcattttacaaaacraaactacctttgatggaaacagcttattgtgtctttagcttttgttgtttttattatttacatctcttgactttgttttttggtcaaatatgccagagac

SEQ ID NO: 9483 - DNA, 201 bp, Homo sapiens
tggagttgggcgacaggagggaggcttggagatcatttctcgtgtcccttccagctctgaaatctgtgagcaatgttgtccagtaaggctgtctctaccasgtaacacatgactgccaagtgggtattttaatcactgtgatttcagaataacagggcgagctctcacagagcattcattgcttcatcgatcatgcagtcc

SEQ ID NO: 9484 - DNA, 201 bp, Homo sapiens
ccttcaaactgtggaaggtcagacccagcgcctcaagcctggaggggcagcgtggggcatcagcctcttatgagtttaagttggctctgacacataccagytgggtgacgttgggttggcttcctgaccctctgagtccttttttataaatgagaacatttgtaccaagatgcccagcattggcctgatggacagtaggca

SEQ ID NO: 9485 - DNA, 201 bp, Homo sapiens; identical to SEQ ID NO: 7085

SEQ ID NO: 9486 - DNA, 201 bp, Homo sapiens
catggctgtgcccttgcctccctaccattggctctccatgtggcagcctgagggatctttaaaactctccacctgaaaagaacgtgactttcttagagtaycgtgtttctaaaaatttaatctatttttgggtcatgtgggaattttgctaagatgcagtttgtgattcagttatctggggttgggctcaagactgcgttt

SEQ ID NO: 9487 - DNA, 201 bp, Homo sapiens
aaccccatctcttttaaaaaaaaaaaaaaaaggtttatttggctcacagttctgcaggctgtacaagcatggctgtacaaacataaattttatggtttttktttagaggcggcgtctcaccctgtcgcccaggctggagcaagtatagtggagcatctgcttcacttctggtgagacctcaggaagcttttactcctagcc

SEQ ID NO: 9488 - DNA, 201 bp, Homo sapiens
ctcccgagtagctgggattaccggcgtgtgccaccatgcctggctaatttttgtatttttagtagaggcagcatttcaccatattgaccaggctggtctcraacctctgattttaagtgatccacctgccttggcgtcccaaagtgctgggattacaggcgtgagccaccatgactggctgtctatcacagttttcagtaa

SEQ ID NO: 9489 - DNA, 201 bp, Homo sapiens
gtggggtaatggatcgtagccatagaggtatacattttaggcagccattgctgcacacctgccgcatgcctgcacacctgccgcattgctacacagatggycgaggccagggttccaccagcaaggagattgcagtgtcctaaagacaaacagacacactgtaatgaaacctgcacacatcaggactctttcttgtcacct

SEQ ID NO: 9490 - DNA, 201 bp, Homo sapiens
taagaagctgtgctaccagattaggagatttgcccgaggtcatataagactcgtcaaaggtcatacagcgattcagagacagagctgactaccctactctytaaaacagctctattcgaagttgtaaaggccatattccctgtccccttccctgcagtgccataccacctgttaccactgacacactgtgcatttatctgc

SEQ ID NO: 9491 - DNA, 201 bp, Homo sapiens
caggcatggtggtgggctgggtgcctgtaatcccagctatttgggaggctgaggcaggagaatcgcttgaacccaggaagcagaggttgcagtgagctgarattgtgccattgcattccagcctggacaacagagcaggactctgtctcaaaaaataaatatataaataaaaaaaattttaaaaatgattaaaagtacaat

SEQ ID NO: 9492 - DNA, 201 bp, Homo sapiens
tctggttggaaggaggaagggcttcaatgggatgtgagcctcaagcacgggagagaattacatccctgggtccagatggttgaaaggggccattcctgagycatctgcagaacaggtgctgtggcatgagaatgactgactaacagaggggtggcggcaccacacagacattagagggtgacctgtgctgcgggggcacct

SEQ ID NO: 9493 - DNA, 201 bp, Homo sapiens; identical to SEQ ID NO: 7091

SEQ ID NO: 9494 - DNA, 201 bp, Homo sapiens
gctgaactctaattaccatgcttggttgctggcgaggcttacgtaagctaatgtattaaagtgcacagcactgagtttagatgtcccctggggaggcctgrggaatgcccttctagtcctttccattgaggaaatgtccccacagagattgcaggggttcccagagtcaatcagccagtctggcctcaagccaggcctcag

SEQ ID NO: 9495 - DNA, 201 bp, Homo sapiens; identical to SEQ ID NO: 7101

SEQ ID NO: 9496 - DNA, 201 bp, Homo sapiens; identical to SEQ ID NO: 7102

SEQ ID NO: 9497 - DNA, 201 bp, Homo sapiens; identical to SEQ ID NO: 7103

SEQ ID NO: 9498 - DNA, 201 bp, Homo sapiens
atcccagcaccttgagaggctgaggctggtggatagcttgagtctaggagttcgaaaccagcctgggcaacatggtaaaccccgtctctacaagaaatagraaattagccatgcatggtggcacgctcctgtagttctagctactcaggaggctgaggtggaggttgcagtgacctgagattgcatcattgcactccagcc

SEQ ID NO: 9499 - DNA, 201 bp, Homo sapiens
gtgtaatgcaaaatgtggactatgccagctatgattgggaaaaataatttttcatacagcattatctatagatttgtattagcagcatactggtcataagygttttgctttccgcaaatatgatgtggtaagctactttaaagtgtggtggggctttcttccgcatggctccttgaggggttgagtcccaatttatccaat

SEQ ID NO: 9500 - DNA, 201 bp, Homo sapiens
ctgacttgttcattgcgtgcctcacctccctagaatgaaagctccacagggtaaggatttttctctttcattcactgattttcttttcttttcttttcttyttttaaatttttaagacagagtcttgctctgttgcccaggctggagtgcagtggtgcgatcttggctcactgcaacctccacctcccaggttcaagtgat

SEQ ID NO: 9501 - DNA, 201 bp, Homo sapiens
agagaattgcttgaacccgggaggcggaggttgcagtaagccgagaatgtgccactgcactccagcctggcgacagagcaagactccatctcaaaaaaaawttttttttaaaaaatgtcgtgttgtctcagcatctctgacctgtcagtcctttccagagcaatacagaaacatttgcagcacgaaagccctgcatggctc

SEQ ID NO: 9502 - DNA, 201 bp, Homo sapiens
gtggtcttcttgcctagctgggcctcctgtgccccagagcgagaatctgagaacgcaggaattgggttgggactgtgggaaatttgcatgtgccatggtamccagcaaggggatcctgggggatctcaggttaatgattaagccctgagccttcattcaagccaggcagtggcagtggccctcaggatttgcagccacctg

SEQ ID NO: 9503 - DNA, 201 bp, Homo sapiens
cactgaatctctggttcaagtgattctcctgcctcagcctcaggctgcagaaatttgcataattaagtaagagttgaattttaatagctgagacaatggaraaaatgtctccagggcattgcagagaccttcgtggcagcctctcccatcacaggcctggaggcctaggaggaaaaaatgctttttggagggcaagcccag

SEQ ID NO: 9504 - DNA, 201 bp, Homo sapiens
cctttaaaaaacgatgcattgcctacacaccataagaatgtaaaaacaactggttcagggcccccacctaaccaaacttttcatatttctatgctccctcyttgtccttgtctgcaggtggatatgtatctgattcacctcctctgccccaaaaacaccacgggaaggcaatagtgtagtaataaggtcggttttgggttt

SEQ ID NO: 9505 - DNA, 201 bp, Homo sapiens
catgcctggctaactttttgtatttttagtagagatagggtttcaccatgttggccaggctggtttcaaactcttgacctcaggtgatccacccaccttgrcctcccaaagtgctgggattacaggcatgagccaccgttcccagcctgggcctgaagtttgaacagacccagcagagaagccaggtgcagagggtttggg

SEQ ID NO: 9506 - DNA, 201 bp, Homo sapiens
ctcccgggttcacgccattctcctgcctcagcctcccgggtagctgggactacaggcacctgccaccacgcccggctattttttgtatttttaggagagayggggtttcaccatgttagtcaggatggtcttgatctcctgacctcgtgatctgcccacctcggcctcccaaagtgctaggattacaggcgtgagccacca

SEQ ID NO: 9507 - DNA, 201 bp, Homo sapiens
aatcccttgaactcaggaggcagaggttgcagtgaggtgagattgtgccattgcactccaacctgggcgacaggagcaaaactccatctcaaaaaaaaaaraaaagaaaagaaaagaaaagtaacactggaagtaagggattatttttcttatgaaacaaaaagcccagaggctgacagtcttacggctccacgttgctgc

SEQ ID NO: 9508 - DNA, 201 bp, Homo sapiens
cagcctcttgagtagctaggatcacagggtctagctccattgcccacgttggagtgcagtagctcactggagccctgacttcccgggctcaggcaagcctyttgcctcagcctcttgagtagctaggatcacagacatgagccaccacgcctggctagtttttgaatttttttgtagagatagggtctcactgtgttgccc

SEQ ID NO: 9509 - DNA, 201 bp, Homo sapiens
atttagctgagcgtggtggcgggcacctgtaatcgcagctacttgggaggctgaggtgggagatcgcttgaacccgggaggcggaggttgcaatgagccgrgatcaggccactgcaccccagcctgggcaacaagaacgaaactccatctcaaataaataaacaaacaataaaataaaaatacctatcgggattcatgtag

SEQ ID NO: 9510 - DNA, 201 bp, Homo sapiens
gtcatctaatatcttacccagaatagcacagttttggggctactgtatgatatgtagttgtgtaaatgaattgactgcctgcctttgtgtgtgtgcacgtrtgtctctctcttcccccctcatttcttctttcctttacattcactcgttactcatatgcacccattgatcacttaccttttacctggtaccttgattaat

SEQ ID NO: 9511 - DNA, 201 bp, Homo sapiens
tcttgttacgcttagcacaaaatccaaacccttcacctacctttgaggccccttaagtattcagtatctgccaccttcttccacgtcatctcctgcctttytgcactctgccactggcaggagaacgcatcagatggtttcctgtcttagcccagggcctttgtatgttctgtttcctctgcctggaagttgctgtaccct

SEQ ID NO: 9512 - DNA, 201 bp, Homo sapiens
tctgtttcctctgcctggaagttgctgtacccttgtggctagtgccatctcatcctctgaccgggacttagaggtcagctcttcagagaggccaccttgtytaagcttagaggcctgctatacctgccgctttatctcagcatgctctttccttttagcacttattcacaagcttcaattatgtattttagctattttttt

SEQ ID NO: 9513 - DNA, 201 bp, Homo sapiens
tcaggaagctgaggtgggagcatggcttgaacctgggagataggggttgcagtgagccaagatcataccactgcactccagccttggtaacagagccagaygctgtctccccaaaaaaaaaaaaaaaaaaaaaaaaaaaaaaaaaaaaagtgagtgaaggatggttgtctgtgctggtgaataggagatgaacattcctgc

SEQ ID NO: 9514 - DNA, 201 bp, Homo sapiens
tagctgggactaccagtatgcaccaccacacctggttaatttttgtatttttagtagacacagggttttgccatgttggccaggttggtctcgaactcctsacctggtgatctgcaggactggataatttatataaaaaagaggtttacttggcttatggttctgcaggctctccaggaagcatagcagcttctggttctg

SEQ ID NO: 9515 - DNA, 201 bp, Homo sapiens
gcagcttgtctactgcactagggatgcctgttcttacggggaatcccaggctgggagagggaacgtcctccggaaggccagcagcaggggcatcccaaagygtatggcccttatctcagcagagaaggagggtgcccaagaagtccccagaggctcaggcttgtacctgggtggggctggcccactcgagaatgtggtaaa

SEQ ID NO: 9516 - DNA, 201 bp, Homo sapiens
ttgcactttttttctggaggacaccacccactcagcccccatccttccttcaaatctatctttcgtgttttctttaatgttctacattttggattgaaaayacactgatacgttgaaacgtcaacagaaaattgccctcttgttcctgtccccaactcctcaaccccctctttaaagaggtcttagctgtgtgttgtcttc

SEQ ID NO: 9517 - DNA, 201 bp, Homo sapiens
cttgacaatgtgatttggagatcattccgtatttgcacagaaagagcgtccttgttttagtttcttgctgcatagtattccatcgtatggaaagaccataytttagtcagctcctattgatggacacataggttattttccgtctttatgctgctaacatgctgcaggcataccttgtccatatatcttgcaacacatgtg

SEQ ID NO: 9518 - DNA, 201 bp, Homo sapiens
aaaaaaaaaaagtagttaatgaaaaacaaaacaggtaattaattaatgataaactagacagggtctcgctctgtcacccaggctggagtgcagtggcgtgktcttggctcactgcaacctctgcctcccaggctcaagcaattttcgtgcctcagcctcccaagtagctgggattacagccgtgtgccaccacgcctcgct

SEQ ID NO: 9519 - DNA, 201 bp, Homo sapiens
ctgatctgggaggatgctcaccagagctgaccaagaactgctcctcccagtctgggggagctggatatcctgccggctctgctaccccacaaagacctggstgctgaccagtagcaatataatgtgagcccgatatagaagttaaagttttctaatagccacattaaaaaagaaatggatgaaattagtttcccctgttta

SEQ ID NO: 9520 - DNA, 201 bp, Homo sapiens
tggcagattggaagcggggaaggaatgaagcgtgtcctgacttctgtcagcttggggaaggaagtcagtgtaagtagtacctgccctgggtggagcagtarggctggaggtggggtggggcatgtggcatggctgcccttcactcacccacctgagaaatggggtcggtgaggagctctgccacctgcacgtgtctagcta

SEQ ID NO: 9521 - DNA, 201 bp, Homo sapiens
aacaagttttaaagttatagttttgcttcctagacctgatttttaaaaatttattattttttttagagacagggtcttgtcacattgcccaggctggtctygaactcctggctttaagtgatccttcccccttggcctctcaaaagtgctggcattacaggcatgagccacggtgcccagcccttaatttatttcgaaggc

SEQ ID NO: 9522 - DNA, 201 bp, Homo sapiens
ggaggcggaggttgcagtaagccgagaatgtgccactgcactccagcctggcgacagagcaagactccatctcaaaaaaaatttttttttaaaaaatgtcstgttgtctcagcatctctgacctgtcagtcctttccagagcaatacagaaacatttgcagcacgaaagccctgcatggctctagtctcctaacatgttga

SEQ ID NO: 9523 - DNA, 201 bp, Homo sapiens
actctgttgccgaggctggagtgcagtggtgccatcacggctcactgcgacctctgcctactggggttcaagcaattcttgttccttagcctcctgagtarctgggattacaggtgcgtgccaccatgcctggctaatttttgtatttttagtagagagagggtgtcaccatgttggccaggctggtctcaaactcctgac

SEQ ID NO: 9524 - DNA, 201 bp, Homo sapiens
tggtgagttattcgctctgctttgttttgattttattatttttattttttaaaactgtggtgaaatacgtataacgtaatttaccattttaatcatttctragtttacagttcaatgacattaaatactttcacactgttttgtgactgtcaccactggaacgttttcatcttctcaaatgaaccattggttttattagaa

SEQ ID NO: 9525 - DNA, 201 bp, Homo sapiens
gggagggaggaaggcaggagtctcctcaactcacctttgcagagctctgaaactgggtctgttcaaagttacacctgctcgtttcttgtgcccgtgaattsctttctaggaatgatcaggcatccataggcaagatcttcctcgagagtcaatagacctgagcccaaatgtcagctctgtgtctgagctgccatgtgacct

SEQ ID NO: 9526 - DNA, 201 bp, Homo sapiens
agagctcaggggctccgactgaagttagtctgctgggaggccccttgctcctgccttgtttttgccctcacaggctggctccagggctacactcctgctayactctgctcaccatctgttaagggagcagttggtaggctgtgagcagcgcctgcctccctcccatgtctaatttaaccagtcacccttctctccgtcggc

SEQ ID NO: 9527 - DNA, 201 bp, Homo sapiens
ggcaagtgtgtggactctgggatggattgcccaggtccattcctctctacctgttatcagcatcctggtgggaccttacagaaataacttctaagtctccrtttctgcatttgtacaagggggctgttgagaggatcaaatgggattatccttaaaaagttaagcatatagtaaatgttatgtaaatgctagctattatat

SEQ ID NO: 9528 - DNA, 201 bp, Homo sapiens
agaataaaaggggtttatttgggctgggtgtggtgactcactcctgtaatcccagcactttgggaggccgaggtcggtggatcacttgaggccaggagttygagaccagcctgggcaacgtggtgaaaccccatctcttttaaaaaaaaaaaaaaaaggtttatttggctcacagttctgcaggctgtacaagcatggctg

SEQ ID NO: 9529 - DNA, 201 bp, Homo sapiens
ttctggctgagcaggaaggtgggagaggggcatccttgtgaggagcagcctgtagggctggggtttgggcagcaggcaggcagaggactttatctgatcayctcaaataattttgcctctgcttggaagggttctagctacaaaggcaacatagcaggtagtgcttgggtgtgatggtgataggcacagcggtattttaaa

SEQ ID NO: 9530 - DNA, 201 bp, Homo sapiens
caaaaccccaggccactcttccagctgcatctttgacaattttgagagttttaggaagtagttaaaaaaagaaaaagagaaaccaaaagccaaagacctcrtttactcacaatacctgtgtacagccagccatgtgggctgcgatcggccatgtgtctagaggaaactccttcacttgcatccctccctcctagaccccta

SEQ ID NO: 9531 - DNA, 201 bp, Homo sapiens
tgagaaggtgcttgggtagagcagtggactggactgcacggctcctgccccggggggaccatgctcagtgagcgattcttgagcccccaccccttctcagygctcaaggattgaaggctaatgaagtggtgcaaaattcaaactttctggaataaaacggagagttggtcctccaggttctctgcagggcgcttgttgagc

SEQ ID NO: 9532 - DNA, 201 bp, Homo sapiens
cagaaggagtgctggacagtgcctggtacttagaaggagttcagtgtttcccccactgtcccccgcctttcacgtagcattactccaaaacacttttccaygtttccctattatcttccttttggtcattttagttgccacatgagagtgtgtctagtggatctgctgtaatttggcaaagcattttccgtgttattggac

SEQ ID NO: 9533 - DNA, 201 bp, Homo sapiens
tgtcatagtttagtaagtggttttaccatcacctccttagctgtgcttccattgttggggctttgggttgtttgcactgtgtccctcttgtaaacaatgtygggatggacaagtttgtgctgggcgtttccttgtccctttggctggttacctcaggcagactggcccataccagcccttccccgcttcattctcctccct

SEQ ID NO: 9534 - DNA, 201 bp, Homo sapiens
ataagaaccacacattttcttcctctggcactcctgagcatatgttttatgccaggtgctgtagtaggaactggggatatgagggaaatacggtccctgcmctgatgtgtaattatagggagatctaacctagtcttttggaggtctccatgctgtagttgaatatgagctaggtgtcatcgttcctgtttacaggtgggt

SEQ ID NO: 9535 - DNA, 201 bp, Homo sapiens
tcctctggcactcctgagcatatgttttatgccaggtgctgtagtaggaactggggatatgagggaaatacggtccctgcactgatgtgtaattatagggrgatctaacctagtcttttggaggtctccatgctgtagttgaatatgagctaggtgtcatcgttcctgtttacaggtgggtgaactgagactcagaaaaat

SEQ ID NO: 9536 - DNA, 201 bp, Homo sapiens
ccatggtgttttctagctgggagaaagcacccaccttaagcaccctttctagccttaggaagacaacacagtttactgtgagctgaaatagatggaaagtycttctataaactagaacacaatctactgtttactgccgtatccctagagttgggcacagtgctgagcacatattgggggttcagtagatatttgttgaat

SEQ ID NO: 9537 - DNA, 201 bp, Homo sapiens
tactcctagccgaaggtgaagggggagcaggtgtgtcatgtgtctagacagagaccgagagaggaggaggtaccaggctcctttcaacaaccagctctcamctcttgcttgaactaatagtgtgagaactcacccatgacggtggggacagcaccaagccattcatgagggatccacccccatgacccagccaccttccac

SEQ ID NO: 9538 - DNA, 201 bp, Homo sapiens
accaaggctatatattaggtcatcaggagttgtcctaattttctttttcttttttttttttttaatttcttttcttctttttttttttttttttttttttwtgagctgaagtgcagtggctgtgatcttggctcactgaatctctggttcaagtgattctcctgcctcagcctcaggctgcagaaatttgcataattaagt

SEQ ID NO: 9539 - DNA, 201 bp, Homo sapiens
ttgctctttaataaagagtatacttcttgtaagtctaaagcagaggttctcaactagaggtaatttttgtcctccagggacatttggcaatgtctggagamatttttggttgtcacaatttggagagggagtttgccaccagcatctcgtgggtagaggccagggatgctgtgctgttcaacaccttgtgatgcacaggac

SEQ ID NO: 9540 - DNA, 201 bp, Homo sapiens
gtgctgttcaacaccttgtgatgcacaggacctcctgcaacaaagaattatctgtccccaaatgttaatagtgcaaggttgagattctctgatctaggccsggtggctcctgcctctaatcccagcactttgggaggccgaggtgggcaaatcacttgaggtcagaagttcgagattctctgatctaaagagaagacaaaa

SEQ ID NO: 9541 - DNA, 201 bp, Homo sapiens
ccgtagaggaatagtgtccctgttgaggggcacgtcctgtccctaccctcctctgtagccccatcctcagccagctgccatccctgaaagggcctctgatyccaggccctcagctttagcccctgcacatagccctattttgtgcagggcgggactttctcatttgccagtcccctagaagtcaagtgtcacccaaggtta

SEQ ID NO: 9542 - DNA, 201 bp, Homo sapiens
ggtagctgctgtatcccaaggctttgccaggttaacaagtggacagcatggaatatttggaggaggtttggaatcgtgcgcacgtgggtttcaattctgcycagccacttgttaagctgtgaagtctctgagcctcagtaagatggacttaactccatctacttgcggagttgattaaagataaaataatgtatacaaagc

SEQ ID NO: 9543 - DNA, 201 bp, Homo sapiens
cagtgttgatgtgagaagtaattaaaacccagtgagggagacagcacgtgtgcatgtgtgagcctccacagacctggttgcatcttggggaggccggatcrcaactccttaaaaggcacgccatgcagtttggcgtcccctgccaccggaagctcccatctttgttgggtggagagagtaacatttatggatctctgctac

SEQ ID NO: 9544 - DNA, 201 bp, Homo sapiens
gccaaattggtactgccagatgaccacaccaacttcagcatattgacaatgatgactttgcatctgggaaatttaaatgtgaggggagaagcagtggcccstgggtatctctgtcctctctgggagggggccaaggggctctgggatggagccaagactcccagttgccctggagctccatgggaaaccttctgtggctgg

SEQ ID NO: 9545 - DNA, 201 bp, Homo sapiens
atttaacaacacgaacagcaggctcctctttggccagttgataccatttcatctggggtgctgggcaagggccatgggtgatgagcacttctctgacactytgaggcccgtccttcttggcctccttctgggccagggccagttaaacaccaccttcaccttggtgcatcctcgggtgccttaggagcgtgtggtggtgat

SEQ ID NO: 9546 - DNA, 201 bp, Homo sapiens
acttggggcaagttgacatgaaaaatccatagacaggcagagtcaggaaaaacaggactgagaaggggctatgaacttgatcctaggaatactggcttacytgaaactaaacaaccacgcaatcctccacacagctttggcccccgctccccgtggccctcccgcccagctcgcctttgcagtgagcagatccagtataca

SEQ ID NO: 9547 - DNA, 201 bp, Homo sapiens
gtcaaggcaactaccctttgcacttggggcaagttgacatgaaaaatccatagacaggcagagtcaggaaaaacaggactgagaaggggctatgaacttgrtcctaggaatactggcttacctgaaactaaacaaccacgcaatcctccacacagctttggcccccgctccccgtggccctcccgcccagctcgcctttgc

SEQ ID NO: 9548 - DNA, 201 bp, Homo sapiens
tgaaccctgtcctcatgtttgaatcatgggtgcttttaaaacacatccatatcaggagcacagccctgggccagctgacttagtacctctggggtgggaaytggcccaggcatctctatatgtatacccgctccaagtgattctgatacacagggagggtggaaagcccctggttaggatacccaagctgaaaggactgct

SEQ ID NO: 9549 - DNA, 201 bp, Homo sapiens
atggcaggcatgcaggtgagcatccctgagccagtgagtgagcccagtgtgctgtccagcacccacatcccgatgtagctttgtttttctttactcaatgytgaatacacagtacatcccatcagaagtctggaagggtctgtagtattttcagttacacatgattgtattttgtggagggaatgatgtgctttagggaca

SEQ ID NO: 9550 - DNA, 201 bp, Homo sapiens
tccatcagcagaacccaaatctgtagaggttgtttcttaacaagttctgggagatagcagctgccaggacaccagacctgccagtagctgggtcgtgctgyactgcatgtcttcccttttccttgtctcaggcacagctagccaggtttatgggttatctgggtgcaaagaagaatcacttcaagttctgcacagttctac

SEQ ID NO: 9551 - DNA, 201 bp, Homo sapiens
actcgaggaaattaaagcacagaatggttaagtaagttgtttaaaatcacacagctagtaaatgatagcttggaatttggaaataagagtcagaatttagyttaatcttctgactgctacaatatgctgtcttccttccattgttctctcttcctgtctgtgcagcctacccacctgccagccagccaactaaccaaccag

SEQ ID NO: 9552 - DNA, 201 bp, Homo sapiens
gtccagactggcctggtgccttggaggctagaagcaaagttgtattttctccctggctgtcctgacttagtgccttagccctcctgttgtttaggaaactrgagagcccctaaagggccaacaggacagcttggctcacatggagggggaggagtgccaaggtcctgccagtggccccatgggacagcctgatccaggtct

SEQ ID NO: 9553 - DNA, 201 bp, Homo sapiens
accatgctctcttcgaggtatttcatcatgtgcttttcccactggctcctatgtaatgtttgtgtgcagcagttggagctctgccgcacggatcatggggygatgtttttactcctgtattctgtgcccccgagtcaggcttttcttccatggattttgggcaaagcttccttgtgtgtcttcacccattttttttccttt

SEQ ID NO: 9554 - DNA, 201 bp, Homo sapiens
tgatagatatcattttgcaggtttgcagtcttaacgtcatctgtgttatccataaaaattcatgttatccttctttaacagtagagtagtaagagatacaktttcatcaaggtatgatatgaatgcctgtgtctgagggatacccacctgctcacatacatgcgcacacagtgacatcaggcaacttggtggttcaggtga

SEQ ID NO: 9555 - DNA, 201 bp, Homo sapiens
gctggggaaatgatttcagagcctgctggcatggagccattttttttttctttagcaatttcccggttggaagttgttgaaaggaagtggcaagcgctgcytgagcagttctagctgggagaggtgggtgctgcagagtctgggattccagggtgaaagccacaggttcccctgaataagctcttactgctggtggttcct

SEQ ID NO: 9556 - DNA, 201 bp, Homo sapiens
cacctctgaggggcagttctgtaaacttgtggctgacagatgactcaaatccaggcaagaaggctggaggccatctgtgaggaaggaaaactgtggcctgytgaatgctctggataatcagagggaagactgtatccacagaggacagactcgctgcatggaacctggcgggagagtaaccagggagctggcatttgtcca

SEQ ID NO: 9557 - DNA, 201 bp, Homo sapiens
gccacaagctggcagtggctcttctcaggatgtggcttcccacataaagtggccctagagggagaatgtgatgaccaggtccctgtggcaataacaagttygatgtaagtgcataaataggcacttaccagaacatttcttgtgagccaggcatggtagttcacgcctataatcccagcacttcaggaggctgaaggggaa

SEQ ID NO: 9558 - DNA, 201 bp, Homo sapiens
accgtccaccgccagcagcatgtgttggggccaggcaggcaagtggcagtgtccactccagcgttctttcctgttctgtgggctccccacacaccaggccrtggccccagagactgtgcttgcaacactggattcctggcttttgaagaaggatctgacctggagggcttggcctgtgcaactgcatcggacttatctaga

SEQ ID NO: 9559 - DNA, 201 bp, Homo sapiens
tcagagaggcctggccctcacacagctctgccgtggcagaggtcagagtcccaccgtgtgggggacctgagctctccctatgcctcccaggagcatctgaygatggaactgctgggagaggggaggggtggcattcctgcagattgggtccttagggtgtgttgaggcacgttccctggacagacctttagttactgttga

SEQ ID NO: 9560 - DNA, 201 bp, Homo sapiens
ccttcttactgagctgcctgccctgaccctttctcccctgactgcggactctgatttgtggctctggttgggaatgtagatttggggacattgtgctcctyatgggtttcttcccgtaggatggggcaaagaaggggttatgagattgagcagatgcttctgggagtctagagtgtactcacatagcgaggtgtggacctc

SEQ ID NO: 9561 - DNA, 201 bp, Homo sapiens
ggtgatatgctaaataaagggtagattattcatgcctcaccttttcagaccatacagggtaacttcttgacattgccatggtatatgtaaagtgtcatggygctggtgggagtgtagcagtgagaacaaccagaggtcactcttgtggccattttggttttggtgggttttagctggcttctttgctgcaacctgttttat

SEQ ID NO: 9562 - DNA, 201 bp, Homo sapiens
agatgtgactggagagagccatgatgctgcttttgtttgtctctaattacacttaataagatgggggcaagggaggaaggcataagagtgccatagaaacyccaatttcccctaaaattagaaaccctgaaactcatgagttgaatagaaaaacctagataatttgccgccccctttctctattttgttcaccttgctggc

SEQ ID NO: 9563 - DNA, 201 bp, Homo sapiens
agtaagccagggtgagtgggagagcagcaccagcctgttggttttagagcagggccaggagggttaacagcttcaggatatgccaagggcatcagaagggytcttgaagatttgttcagagcaagaggaacaagggtgcgatcagcctgaggcagaagccaagcaatacaccattaactcagggaggtggagggaagcagc

SEQ ID NO: 9564 - DNA, 201 bp, Homo sapiens
agagggaactgaggcagaaaccacagtctgctttaaatgaagtccacccctaggacttattttcctgggcacttgggaacctggttattaccatcacaggrtggttttatcagtcaattgaagtagctaagaagggagatcaaggcaccggacaaccagagggggcaaaaattatcccagcttttgggaaattaggaaaac

SEQ ID NO: 9565 - DNA, 201 bp, Homo sapiens
gcacaccaccacagcaggctaatttttttgtatttttggtagagacaggcttttgccatgttgcccaggctggtctcaaactcctgaactcaagcagtccrcctgcctcagcctcccaaagtgttggaattacaggtgtgagccaccacagctggccactaattattattttaaaacagcattctgtgaatctaattatga

SEQ ID NO: 9566 - DNA, 201 bp, Homo sapiens
aacatatctcctggtttgagagagacaggcagaggcagggagccaatgatctctgatgctgtcactctgctcctcattcctgcatccccacctgtgtgcayccatgctaaccctgagacttgtcggagctgggactgggcatctctcaagatggattgggcatctcctatgatggtctgggcatccatgtcttccgttttt

SEQ ID NO: 9567 - DNA, 201 bp, Homo sapiens
tgagacaacttagcatcttctgggcacctcctggcagatgggatgccctcctggggcactggagcctctcagacctgagaaggtttcagagtggcttcacstgcgagttcaccttcagcaggtggcaaaactgattccctaatttgtttttggtttagagatgatccaggaaagttgtgagttactctgctttgaaaacat

SEQ ID NO: 9568 - DNA, 201 bp, Homo sapiens
tgtgaggtttcgggggtgctgagttgctttggggcactgttgagtcatgatactgggagatatcagggcccctcgcaggggccttcacagccacgcgaccktcctggtagctttcctttcttgattaagttaacattgggtctcagagtcagttgtagagttgggaggtggggcactttgtttccagggtgggcccctcac

SEQ ID NO: 9569 - DNA, 201 bp, Homo sapiens
gtgaggaggagatgaataaaaagaaagaaaaagaatccctatttgcattatagttaggttgaagattgggtttcctcagcctggctccctccccagccccrttaaacatctctatcatcatctgggcaaactgctgagtcatcacagccttggagtatgtggtggagagacaaactgaggacacccttccggacaagtaga

SEQ ID NO: 9570 - DNA, 201 bp, Homo sapiens
cattttacccagcccctattcaagatggaatggctctggttccagtgcctctgacagtgtcatgtggctcaaagtagtcagagctggagaggtttcctccytccctgatgagaggaaagggcacaagttttgaagtccactgagccttgattctaccattcattctttgtattttccattgcttcataacaaatttagcag

SEQ ID NO: 9571 - DNA, 201 bp, Homo sapiens
ccaaacctttctggtctttacttcctcccctcaccccccaccgagtctgcttcagctgctgtctctgggagcctggagggtgggggccagggagctctgcytgtgtccccaagcacgtggtggctctggtcagaggccggcccagccagcagctggcccctgccactcagcaggaggccagcctgaggctgaggggctccc

SEQ ID NO: 9572 - DNA, 201 bp, Homo sapiens
tgccacgtatgggtcagggtaggccaggttacacagaaataacagatatgcccaaatcaccaggtcttaaaggaacaaagatttgtttcttgctcatgccrccttgtccatcttgtccatcatgggtcagcctccttccgggcccagactgtctgaacattgctggccacggtggcagagggagaagtgagttccagatgt

SEQ ID NO: 9573 - DNA, 201 bp, Homo sapiens
gcccagactgtctgaacattgctggccacggtggcagagggagaagtgagttccagatgtcatgccctggcagctgcgtactccttcttggaagttccacycaccattcctggcccaacctgaacaggagaatgaaacagtgctctttgcccacacgcccaggaggggagaactggaatatttggcagaaaccactagtga

SEQ ID NO: 9574 - DNA, 201 bp, Homo sapiens
tgtgccaccacacctggctaatttttgtatttttaatagacacaaggtttcatcaccttggccaggctggtcttgaattcctgacctaggtgatccactcrtgtcagcctctcaaagttctgggattacaggcatgagccaccaggcctggtctctccagctgactgaccccttttcttgcctggctctgggccaggctct

SEQ ID NO: 9575 - DNA, 201 bp, Homo sapiens
tcgtgtgtgcgttgctgtccccatcgggggtggacctctttgacccacctcttagcccgttcagcctctccatagtccagaagcagaggtgctggtgaccrcctcaggaaatagccctaagacaggtggccttaaagtgactggctggcttcagcccagctggtggctgctctctgagaatcagagaccttgagcacatct

SEQ ID NO: 9576 - DNA, 201 bp, Homo sapiens
cacaggcagccccatgaagagccctgtctccaccttgcccttccccaccgagactctccagcagggactctggcctgctgggctgccacggtaaagcagcrcccctgggaaggcggtgccatctgcctgatttcgctagactttagccatctccagaaccccacctgatgtcctgggatcccactcttcaggaaagggaca

SEQ ID NO: 9577 - DNA, 201 bp, Homo sapiens
gactttagccatctccagaaccccacctgatgtcctgggatcccactcttcaggaaagggacattcctggaggcagaaatgtagcgcagctctgaatgagrccccaaaagatgggagatgcagaagcccctttgggaggagaggacacctgggcaacccttgaccccctttcccacccccacctccaggttgggagcacgt

SEQ ID NO: 9578 - DNA, 201 bp, Homo sapiens
ggtgccagtaggctcgatgtcttgggaaagtccaccttctcacagatgtcactcgtgccgcatcctcccatggtggaggggcccagcaagctccctcgagsccttccatgagggctccagtcctgttcctgagggctctgccctgatgacccagttacctctcagaggctccagctcccagtaccacctccttgggtgcta

SEQ ID NO: 9579 - DNA, 201 bp, Homo sapiens
agcccgtcacagataggatcaattcctcagcaggaatgcagtgccccctgcccccattgccaacaatgtcataattgcccctgcctctcctctccagctayaccaagcacaccccccatgcctgtgggtcctgcacgaccacctgcccatcatgttcagtcctgcatctccacccacctggacaccacccctcagccctcc

SEQ ID NO: 9580 - DNA, 201 bp, Homo sapiens
tgaaccaggtaccacctgggctaatacttacttataacacttcatttttatgtaatcatcactatcgtaattggaaaaaccatgatccctacagatagaargtaatcattaaaacaagcacagttaaaaccaaaaagttactaagcttcatctggttatcacacttgcttaaggcttggagcttgaagccctcactctgtt

SEQ ID NO: 9581 - DNA, 201 bp, Homo sapiens
aagtgtggtggcacatacctgtagtcccagctactcaggaggctgaggcatgagaatcgcttgaacccaggatgtggaggttgcagtgagctgagattgcrccactgcactccagcctgggtgacagagcaagactctgtctctaaatcagtcaatcagtcaattgttctttatttgtaggggactggaagctgctctgga

SEQ ID NO: 9582 - DNA, 201 bp, Homo sapiens
cttgcacactcctttattgtaataaaaaccctgtgatcaagaaaaaatgaaaactataatgagattcttgacagtgagccccagagccttgatgttgcctrttgatgcccttaaattagccaagttcttccccatcagagtggtcctgccttgaacccaccaagcatggctactctgagttcctgagagctttgatgcact

SEQ ID NO: 9583 - DNA, 201 bp, Homo sapiens
actcctttattgtaataaaaaccctgtgatcaagaaaaaatgaaaactataatgagattcttgacagtgagccccagagccttgatgttgcctgttgatgsccttaaattagccaagttcttccccatcagagtggtcctgccttgaacccaccaagcatggctactctgagttcctgagagctttgatgcactgtttcct

SEQ ID NO: 9584 - DNA, 201 bp, Homo sapiens
aagtgcctcttccatgagccagactgccagccaggccctcgcagcctcacctggggtcttagagggcaccttctgatctttctgcccaagactttgttttytggggttttttttgagacagagtctcgctcttgtcatcagggctggagtgcagtggcacgatctcagctcactgcagcctccgcctcctgggttcaagca

SEQ ID NO: 9585 - DNA, 201 bp, Homo sapiens
tagagggcaccttctgatctttctgcccaagactttgttttttggggttttttttgagacagagtctcgctcttgtcatcagggctggagtgcagtggcaygatctcagctcactgcagcctccgcctcctgggttcaagcaattctcctgcctcagcctcccgagtagctgggactgtaggcacctgccaccacacttgg

SEQ ID NO: 9586 - DNA, 201 bp, Homo sapiens
gttttttggggttttttttgagacagagtctcgctcttgtcatcagggctggagtgcagtggcacgatctcagctcactgcagcctccgcctcctgggttyaagcaattctcctgcctcagcctcccgagtagctgggactgtaggcacctgccaccacacttggctaattattgtatttttagtagagacggggtttcat

SEQ ID NO: 9587 - DNA, 201 bp, Homo sapiens
tacatcatcactattagcagaccagcactgataccaggccaggccaggactagaaggctctgctgagggaggggcaagatggggccagttagatagaaatyagagtgatgtggtattataagcttcactgaaataagcagagtcaatattgcttacaatggcacccaccgaaacacaagaagccagccacctcttatgggg

SEQ ID NO: 9588 - DNA, 201 bp, Homo sapiens
tagaaagtgaatcgcttcatctcacccaggagtccagcctgtaggtcaagtatggcctgccacctgtgtctgtacaatctgcaaactaagaatagttttamctttctgaaaaactttccaaaaaaaatttttgtatacatagagatgaggtctcactatgttgcccaggctggttgcaaactcctgagctcaagtgatgct

SEQ ID NO: 9589 - DNA, 201 bp, Homo sapiens
tcctgagctcaagtgatgctcttgcctcggcctcccaaagtgctaggattacaggcgtgagccactgcgcccggccagttataaactttaaggaaaaggamactttctaaaagtgaaatctcccacagagtcccgctctataaaacccataaagtggagctgctcttgatgagagtgaggggaagagcctttctgccaccc

SEQ ID NO: 9590 - DNA, 201 bp, Homo sapiens
ggacactggcattcagaacatcattccagattccccaaaaaccatatagtcccaccttctcatttcacaggcaggaaactgagtcacagatggggctgttscctgcccagccccttcgaggaaagcatgcgggctttcctttcctgaatgagtctgtgtcaaagcttcctgttcacagtgtttactttctacacgcttgcc

SEQ ID NO: 9591 - DNA, 201 bp, Homo sapiens
gtcttgtttttgtttgggtggctctgtctcactgctaacaccttagtgagatgccttccaccctcctgagcacaccagcctcccactgggtgtgtgcctaktgcggggcgggcggaggttgggagggtgttggcttggcttttaacctgtggggattttgtccaacaaggagtggaatgatttcagagctgccctgaggct

SEQ ID NO: 9592 - DNA, 201 bp, Homo sapiens; identical to SEQ ID NO: 1009

SEQ ID NO: 9593 - DNA, 201 bp, Homo sapiens; identical to SEQ ID NO: 1010

SEQ ID NO: 9594 - DNA, 201 bp, Homo sapiens
aaaaccctgtttctacaaaaaatacaaaaattagccaagagtggttgtgtgtgcctgtaatcccagctactcaggaagctgaggtgggagcatggcttgarcctgggagataggggttgcagtgagccaagatcataccactgcactccagccttggtaacagagccagatgctgtctccccaaaaaaaaaaaaaaaaaaa

SEQ ID NO: 9595 - DNA, 201 bp, Homo sapiens
agctaaacacagagagcccttgcaactggagaactagcaggaggccctcgctctggttctttgtcagcgggtgggacggggtaggatgtggcttacaggcwgctgtggaggagaggactgtgctaggaaagaggttggagctggtggactctctcccaggcgctgcttttccaacaggctttctggaaggttctggcctcc

SEQ ID NO: 9596 - DNA, 201 bp, Homo sapiens
gccgtgggagaactggcctccttgggaatgtgttgtcctgcgcggcagagcactttcaggtacgggctgctctgtgaggccaccctgtgctccagcccgcrgcacttgagactgacttgccctgaggtttgtgtgagcgaaatcgggtcttatgcaacagtgagtgcgtgcatctccgcttcgagctgttacatcagaaag

SEQ ID NO: 9597 - DNA, 201 bp, Homo sapiens
atataaagtttaaagaatgataaactgaacacccatgtacccacaactcaggttaagaagtgaaatattcccagtctctagaccccttctgtgttccacartccttttactgaagtgagaatatgctatttatgctctttttactttttttacttctgtctggctcacatgtcttgttttttttttaatagctgataacat

SEQ ID NO: 9598 - DNA, 201 bp, Homo sapiens
cctgttatcagcatcctggtgggaccttacagaaataacttctaagtctccgtttctgcatttgtacaagggggctgttgagaggatcaaatgggattatscttaaaaagttaagcatatagtaaatgttatgtaaatgctagctattatatgaggtggttttgttgatacttactgtaaaagaccacagcagactatctc

SEQ ID NO: 9599 - DNA, 201 bp, Homo sapiens
cctcaccagtattcgtgtgctctgggtcagtgatgtctccatctgcatcactgctggtggagcacagtgggaaaggtcagccttcaaactgtggaaggtcrgacccagcgcctcaagcctggaggggcagcgtggggcatcagcctcttatgagtttaagttggctctgacacataccagctgggtgacgttgggttggct

SEQ ID NO: 9600 - DNA, 201 bp, Homo sapiens
ctcatgcctcattagccaaaactgtcacaggtaaccagcttcaagggaagctgaaagtggggactgaatcatcatgatggctgtgcagggaccccattccrgatcaattatgtcacactcgctgaagccaaggctcgtgggttgtgatgtgaagactgggctgcgagccactgactgagaccagttcatcactgggcacag

SEQ ID NO: 9601 - DNA, 201 bp, Homo sapiens
ttccatacagggtctcctgcacccactgctgcaccagccaaaggcagtcagtcatactcttagacaagtgagctcgttttgtctcagcctggggttgaatytcccatctacagtctgttgtcaggtcctcagactttgcattcccagtggagcatagggaagggtaggaggccctgagctcccagctgtggccgttctcac

SEQ ID NO: 9602 - DNA, 201 bp, Homo sapiens
ttttggtggtcttggctgctgatgggtggggtgagccccaggaggaagttgggacaagtcaacctcatggcagatgtgccagggagagctgcgggtgagayagattgttcctatccccctctccttgatgtgggaggactcagtacctccagcacacccttctcatggaggttggttatgtggtacttggcctcaagtgaa

SEQ ID NO: 9603 - DNA, 201 bp, Homo sapiens
agaaaggcccctcccctcacatctaggggaacccaaaagggagcatggcagcaaggctgcaaggccagccccagccaagtttgagatccacaggcagatcrgggttcctggttagagaggcgcctcattctccagcagagggagctgggcaccttcaccagcagctccctgtcaatatttatccattcttgccctgctttt

SEQ ID NO: 9604 - DNA, 201 bp, Homo sapiens
ggagggcacagccgtattacagtgccagtgtgcctggccatcagcatcttcacccttcccagtctgtgtggggaggctgtaaaccccgtggattcagctcygtgtggagtttctgtgctatggtgggactgctcattttgccccatcatccctttggcctcccacacacctgccccttcccagggatcacgtgtgtctcca

SEQ ID NO: 9605 - DNA, 201 bp, Homo sapiens; identical to SEQ ID NO: 7132

SEQ ID NO: 9606 - DNA, 201 bp, Homo sapiens
ggttgtgtgggcaggtggagactcactggctttgatggagactcttagggaaactttaacgaacatgtgggaatgctttgaggaagaagcaaagggcggcrtgaggcactgaaagaaatgagtgcagctgcagaggaaccctcagatctgagttaggttttgaggacttctatgaaaaaatggaattagaagtcaagtaag

SEQ ID NO: 9607 - DNA, 201 bp, Homo sapiens
ctctgacacgggcagattcccacccatatcttctgtattgcctagggaggtaataagagagaacctgtcggcttcgcctgagaagaacaccacccacgtcygctgccgccgcaagagtgttttctgtgttccacacgttttgctgagcactttgcattcatatttttctcatgtaagccttcacaacagccttttgaggta

SEQ ID NO: 9608 - DNA, 201 bp, Homo sapiens
cctgtaaaatggggatcttcatatatcctccctctctggattggtgtgaggttaaaaacgcgataatccatgctgtggggtacacaggagccctgggtctrgtgtttgaagacagcttgaccttggatgagatcatgcctatgtcaggtcacccacgctccatgcacctgactcatcagtgttagttcaaatagagcattg

SEQ ID NO: 9609 - DNA, 201 bp, Homo sapiens
ataatttgaggggtggtgaatgcaaaggactaatccaccaaccccccagcaagtttgcaatgagggaaagtctctgtcttgcaagaggagacaccatagayagaaagcaatgggtgcaccactctgaatgctggctgcccagctaggttgctttttgcagggtggtctgtcctcaggcagcagccagacaacattttgggg

SEQ ID NO: 9610 - DNA, 201 bp, Homo sapiens
gttaaaaaaaaaaaaaaaggaaagataccatttttgtgtgtttgaattatttagaaaatgagagacatgttgctgccatcaagttgctcgcagtctaatgrggaaagttggcaaataaacagctggaggcttccagatagtgaatgttgatgttattgaccaagttccttgtcttgcaagacatgaccagtttggagggga

SEQ ID NO: 9611 - DNA, 201 bp, Homo sapiens
atagttgtgctatgctgtggtattaaatctttcctcataatgtttttcttgactattaagaacaaatcaaagtttccacagcaaacttgttttcaaaaaaycaagtcttaattatagtggccgacttctcatttctacatggtttctccttaatggattctctgtgtttgtaagttttgtcaggctaaataagagagagag

SEQ ID NO: 9612 - DNA, 201 bp, Homo sapiens
ctcagttcagtgggaaaggggaaacctgcacaatgcgtctaatttgtagctgtggtttatttcttctaaaaccttttagactacttagttatataaattcyactaagtaaaatttgcctcttctatatattttcttaatattaaaaaacatattctgacaatagaactataatgatgttgaaaataatgattcttccagaa

SEQ ID NO: 9613 - DNA, 200 bp, Homo sapiens
tgctcagcctgcttgtttcaacagaatgtaagttacttccagcagggaggatgcctggatcttggttacaaatttgacagagtttacattttccaggacagaccttgctgcccatccttagcttttgaactgggaatgatctttacatccatagagattttcttatttttctttcaactcaagatgcttcaatttcttta

SEQ ID NO: 9614 - DNA, 201 bp, Homo sapiens
tttctactttcctgcacttattttctttcaaaatggcagaaaaacaaacttatgctttttcgtggtaaacaaaagttgataaagcacaaatggtacttgasactgtttttagtttctgatgaagtatagtacctgtcatagctccgcatatctgctactcacagaggtcaatgtaattctttccaattttctcttataaat

SEQ ID NO: 9615 - DNA, 201 bp, Homo sapiens
ctgaaaatattttcaggataaagggatgaatgaatgaatgaatgaataaatgaatgaatgaatgaatgaagcaaatccaatgaggtcacaggtaaggaacrgatggcttcaaatatgatctgttcagtacatgctagtgttccacacgtcctgaaatcaatggaccagacgcttctatgtctgaagcaggcaaaagaagga

SEQ ID NO: 9616 - DNA, 201 bp, Homo sapiens
aattcttaaacatcccaaatctctcaaactctgggcctcttttacagttgctctagtaaaggtctgcatcattttttaaccagactgcctcagtttcaagyctgctcctcctaccactggcattacaattatccactacagcctcccccactgacagaatgcttagctcaagcacttagcaggtcatctcctgtctatggt

SEQ ID NO: 9617 - DNA, 201 bp, Homo sapiens
tttcattccatttttcttctaaaatatttaaatggctgcagagttctccattttatgaagttctgaaaactcatttaaccaactttcttctattgaatggktgttagtttttattccaaattattaaattaacattatgtatatcaactggtatcttaagtatgtaagactctctgaatatttatttttattaatgtctta

SEQ ID NO: 9618 - DNA, 201 bp, Homo sapiens
cagtggttctcccggcatggtgtttgagctctgagaatggacagactgcctcctcaagtgggtccctgacccccatgtagcctaactgggagacatctccyagtaggggctgactgatacctcatacagccagatgcccctctgagatgaagcctacagaggaaggatcaggcatcaatatttgctgttctacaaaatttg

SEQ ID NO: 9619 - DNA, 201 bp, Homo sapiens
gccacattttcttaatccagtctatcattgttggacatttgggttggttccaagtctttgctattgtgaataatgccgcaataaacatacgtgtgcatgtrcctttatagcagcatgatttataatcttttgggtatatacccagtaatgggattgctgggtcaaatggtatttctagttctagatccctgaggaatcacc

SEQ ID NO: 9620 - DNA, 201 bp, Homo sapiens
aaaagtacaaatgttttccagtgtcttacatcactccttccttaaatgtcttccttttttttttttttttttttttttttgagacagagtcttgctttgtmaccaaggctggagtacagttgcatgatcttggctcactgcaacctccgcctcccaggttaaagcgattctcctgcctcagcctcctgagtaacttggatt

SEQ ID NO: 9621 - DNA, 201 bp, Homo sapiens
gaggaatttgacactatttgtggtttgtgtgtgctgtaccacccatgggccagtactaataaaacaggattatggaaattagcttgattcatcattttttcccttcatcttgcttttgcccttttcagcctttgctgaggactatgtctgattatgatacattttttccttttgacctaaatacattaaatttaatcagct

SEQ ID NO: 9622 - DNA, 201 bp, Homo sapiens
ttctacatagaactgtagtataaataagatcataaattatattaagaattactttatcaatgtcctctcctgaaatcaattggatatcatttgcatcaaawattgttatacaaagtcaatatgttttgacccagttagttcctttcatttaagttacttcagacctaagtgctgaaagaaaatcatctgcctctcagaggt

SEQ ID NO: 9623 - DNA, 201 bp, Homo sapiens
cagatactgctggcagagttgacactcttgtgcatagatagattcatgcacaatgagaatcctgatggagagatgccacagaaatatataatggaaaatcstataatagacacaaggaaaaaaatattacgaagagtatcctgctaactcctatttgtgtcacacgtgtgcccgttttcattacctaaaaaactctgataa

SEQ ID NO: 9624 - DNA, 201 bp, Homo sapiens
ctgaaagattctggaaagctgtattctccagtatagtacccactagccacatgaggctatttaaattaatttaaattttaaaaacaaaaatcccagttctrcagttgcactagccacattttaagtgttcagtagccacacacatgtggccactgtaatgaactacacagttatcaaaaaatttccatcatcacagaaagt

SEQ ID NO: 9625 - DNA, 201 bp, Homo sapiens
agtgtatgctgcctcatttttaaataatacttggacaacaaatatctattgtatttctgtcactactgcagttatccaaaagccaacactgcaaaataatctgaaggtagtttttcagaactgcatgatatttaaaaactatatattgattcaaatagttaactccttaaaatagcttttaaaaaattcaactgcattcaa

SEQ ID NO: 9626 - DNA, 201 bp, Homo sapiens
tattacctagaatttgaaataaatatcattcctattttacagatgaggaaactgaggctgtgagaggttaaataacttagctttcattatgcagccagttmatggcagtgataatagatgaacccagaattgactataagcttaaatattttggctatataatcctgtcttcaaaatattagataaaataatcctgagaat

SEQ ID NO: 9627 - DNA, 201 bp, Homo sapiens
cacttccctgtaaatccccttaccttctcttcttccattgtgcttttctagaaaaacaaacaccctgatcaagtctaacttgccacatattttgtgactctatctaagaagttaagcatggacattaccgatcgtctaattttcaatatgaccacaaaactcaactgggcctgtaacgctacatagtgctactacagttcc

SEQ ID NO: 9628 - DNA, 201 bp, Homo sapiens
atgtaggtatttactgctataaacttccctctcagtactgctgttgctgtatcccacagattttggtatgtcatatttccactttaatttgtctcatgaaytttaaaaatttctttcttaatttattcattgaccctttggtcatttaggagcatgttgtttaatttccatgtgtttgtctcatttcagagaggttcttct

SEQ ID NO: 9629 - DNA, 201 bp, Homo sapiens
ttttggtagtctatttaaaggtttgtcaatattgtttatcttttcagaaaaccaacttttcatttttaaggctgggtttagtttgttcttgcttttctagytccttgaggtgcattagttcatttgaagtctttatattttttgatgtaggtatttactgctataaacttccctctcagtactgctgttgctgtatcccac

SEQ ID NO: 9630 - DNA, 201 bp, Homo sapiens
aagtgcagcatgcattagctatttttcctgatgctctcctttcccccaccctgcttacagaccccagtgtgtgttgttcccctccctgtgtccatgtgttytcattgttcagctcccacttatgagtgagaacatgtggtgtttggttttctgttcctgcattagtttgctgaggataatggcttccagctccgtccatgt

SEQ ID NO: 9631 - DNA, 201 bp, Homo sapiens
catgggaggggatatgtaaggagaagatggtaatttaaaattcatacttcaggagagaagtttcatgcacagatggacctttatctacctggggtgtgggytgtagctaaaccaggaaagtcaatcagatttccaaaagatggcatgggcgcatgatgggttgtgaaggatagcatcaaggaggatgattagcagtgttaa

SEQ ID NO: 9632 - DNA, 201 bp, Homo sapiens
aaaagcaaatgtccataaagattgctgtctgggattagaccttcgcggtggtgtactgtgagaaggaaacgacaccctaaaattacattagctttgcagtkactcgttcagagaagcttgcatagtggagttcatacctattcattattaacgttggaaagttttggcatgcacttcagagctcctgtatgtgttgatcat

SEQ ID NO: 9633 - DNA, 201 bp, Homo sapiens
atataaaattctgtcctattttgtttttcaatacaagtggctctcaattcatacattattgcacaatttgctttgtctcttatctgaagttctattcagaytaaacacatcaatgtccagtaagactgcctatctcaacaggggccacagaaaagtaattaccagtacagtttttgaaggtaccctatcatcgtgactaaa

SEQ ID NO: 9634 - DNA, 201 bp, Homo sapiens
ccactgccatgtgtccacatgttctcatcgttcagttcctacttataagtgagaactacagtgcttgaacaaaccattttcttaattttcaaagtataagmagcagcagcataggtcggcttttcaaaaaggttaaagaattttcacaccacaaaccagtgttcccttttataaagttgcgcttccaattcagttcaatat

SEQ ID NO: 9635 - DNA, 201 bp, Homo sapiens
acaatcactctttgccctcccctcctattttatttttcttcaacttttaagttccagagtaaacgtgcaagatgtgcaggtttgttacataagtaaacatstgccatggtggtttgctgcacagatcaaaccatcacctgggtattaagctcagcttccattacctattattcctgatgctctccctccccaaccccccac

SEQ ID NO: 9636 - DNA, 201 bp, Homo sapiens
tgtgccaggcacttattacacagtcgagaaatcttagatattcgcagtagtgatggcatatgcatctcaaagagtctttcttcattcaagggggtaaatgwgaattgttagaatttcaaaaactgggccaaggtcggtcagaagaaattctaggcaagaggacctttcatttcccttcaaaaaacactatgaaggctaatt

SEQ ID NO: 9637 - DNA, 201 bp, Homo sapiens
gaatgccaagaagtatcaaatacatattaaacataaccagagaaaaatgagagagcttgatcctcactaggcaataacaaaacaagaatactatttaatayttactaatcctttgtcatgcatgaaatactttcgcatgtttccggatcaaacaggctattgaaagactccatttcatgacagctgtgatttttctgagca

SEQ ID NO: 9638 - DNA, 201 bp, Homo sapiens
aggtgggaattgaacaatgagaacacttggacgaagggtggggaacatcacacactggggcccatctggggtgagggaatgggggagggatagcattaggwgaaaaacctaatgtaaatcatgaattaatgggtgcagcaaaccaacatggcacatgtatacatacgtaacaaacctgcacgttgtgcacatgtaccctag

SEQ ID NO: 9639 - DNA, 201 bp, Homo sapiens
tttagagatcattaatgtagggcactgtggcttttgaaattacctttctttattcaaagagccagctgctttgtacagatagtgatgttacagataaatawcaatatgtggacaggactaaacaatcagggaccaccatcgaccaatggaatagtctggctactttgagggcaaaaatttgaactcccaaacttcagtgtt

SEQ ID NO: 9640 - DNA, 201 bp, Homo sapiens
cctgtggctttgggcaaattactctgtagaggaagtcttctgggtctgactggatacgaagtctgagaccatccagtatagtggcatttgagggaaaaatwatctgttaattgatctatctataaaatagcaggagtgagggtgggtgggtgttgctcatgacctctgtggttccaatcggggattctttctattacactg

SEQ ID NO: 9641 - DNA, 201 bp, Homo sapiens
tttaggaatagtactggtattgctttgtcctttgatacttcaatatttttcccccaaccatcaatctgaaaactactaactctctccctgaccttccttcytttttccctcactttatccttagtctaattatctccccaaatttttagtttcccatcttttttctacataaagagtttctttaatcaactttaaatacca

SEQ ID NO: 9642 - DNA, 201 bp, Homo sapiens
tacatttatcagtttaaaatcaagcaaatgtataactattattcaaagccaccaatgtttcataggaggaggctaactatgtgtcttcattttttgaaaayagataaaatttttcctttaaattccctttccctggggccaagtgtcaaccaccaacatatttacctatgaatatacattaactgaaaaaattgctccctt

SEQ ID NO: 9643 - DNA, 201 bp, Homo sapiens
aacaatgatagactggattaagaaaatgtggcacatatacaccatggaatactatgcagccataaaaatgatgagttcatgtcctttgtagggacatgaaygaaagaggtggagcctttgagaggcaattaggccacaagggtggagccccatgtgcagaattcctgcccttgtaaaagaggccctagagagctccctcac

SEQ ID NO: 9644 - DNA, 201 bp, Homo sapiens
gatttccaatcacaatagcaaagacttggaaccaacccaaatgtccaacaatgatagactggattaagaaaatgtggcacatatacaccatggaatactaygcagccataaaaatgatgagttcatgtcctttgtagggacatgaatgaaagaggtggagcctttgagaggcaattaggccacaagggtggagccccatgt

SEQ ID NO: 9645 - DNA, 201 bp, Homo sapiens
attacagatttggagaaacaaaaaattaaaatggtcaaaagaggcatttatttcacatctctaatgtaccagatacatcactaggctcttcatatactttytcacatttacttctcagaacaaatctacaaggcagagtcattcatccatttcataagtatttattgagtaactaccatatgcacaagcccttgggcagga

SEQ ID NO: 9646 - DNA, 201 bp, Homo sapiens
cacctgcttcatttcagagatgattcaaaatttcagaacttaatgctcctggttcagttctactaagttaatgcttcttttttttcccaacatgtaactcwctcagtcttgtcagaacacaacttctgctatggaggaaatatttccatcaggaaagggccaagttagtgtcttaacttgactgccttgaatggggactct

SEQ ID NO: 9647 - DNA, 201 bp, Homo sapiens
caatcccagctactcaggaggctgagatgggagaaccgcttaaacctaggaggcggaagttgcagtgggccggtatcacaccattgcactctgggctgggycatctgaagagcaagactcagtctcattaaaagaaaaaaaaaagaaaaaaaaagcaaggtaggcttgagtcataatctctctctattcaacaccaccaga

SEQ ID NO: 9648 - DNA, 201 bp, Homo sapiens
ggtgcataattttcaattatacaagaaaatagtgtccacaagttatttttttactcactcagtcttcagttgttaatgaatgcatttccttaccttgtatrttttacgtaaataagatttttataaagagactcagtaataactgtgtcacccacttccacataaaatcaaacaattggcaataagatatgccagactgta

SEQ ID NO: 9649 - DNA, 201 bp, Homo sapiens
gtggggaacaaaaatcaatattatttcctcaaaggtgtagaaaaccatggctaacatttgtattccacttacattgtacttataatggtactttttcacaytgcttgtcatctgctgttataaaaataatgcaggaatctgaaaaataataattagtagaactaacacttacaaaggtcttactctgtcagacactatcct

SEQ ID NO: 9650 - DNA, 201 bp, Homo sapiens
cgctcttacccgcatggcagacacacttcagtcaaactccaggaagtcagctttgatcttaatggcttcaatcacggattgaatttagtattttcctttgrctacagtgacccaccagtgcatgttgttaaaaacagcaatatcaataatactctcataaataaatgtaatctgattttaaatcattgtatcacaattgta

SEQ ID NO: 9651 - DNA, 201 bp, Homo sapiens
ctgtacagattcgccactggtaactcagataccttcccctggtgataaacccatgagtaaaatgatcagatctacatttttggaagattatgttgaagatkagcttgaaacgattcaaaactgatggcaagaaaacacctagaagacaatttcaataatcccagtgatgagtacctcaactaaaggcaaaagcaaggaggg

SEQ ID NO: 9652 - DNA, 201 bp, Homo sapiens
agaaggtgctcaaacaactaagaagaaacaaataatctaatttaaaaatgagctaaagatctgagtagacatttctcaaaaaagacatattagtcgtcaamaggtatatgaaaaattctcaatatcaataaccatcagggaaatgaaaatcaaaaccacagtgagatatcatcttaccccatttagaatggcttttatcaa

SEQ ID NO: 9653 - DNA, 201 bp, Homo sapiens
taaagaaaagataaatacataaggtggtagatatcccaatgaaccctgatgtgactatatcagtgtatcaaattattgcaggtactccaaaagtatgcacwtctattatatatcaataaaaataaaaatataaaaaaggaaattatcctagctctctgtgctgcctgcaatgtcctttcctctctgaccacctatgacagt

SEQ ID NO: 9654 - DNA, 201 bp, Homo sapiens
aacaatttaacagcagttaggtcaatgtagtataaaggggactttataagaaaattccacatgtattaaatcatggcctacaaataagaatcagtttttaytttttaagaatttcaaatgttatggcctatgttctcttaattttccctttctggctatctcaggaaataatgagcactatagaaaaggacggctaagaaa

SEQ ID NO: 9655 - DNA, 201 bp, Homo sapiens
caccacagtggttcatatcactttggacgtattacttctgatctagcatgacactaccacagaggtcaactgaagttccacacagctaccatagggagagsaaaacacaggattccatgcaaagattgtagcaaaatattctctgggattcacagaacacatattatgattaaagttctattaattataaacataaaacag

SEQ ID NO: 9656 - DNA, 201 bp, Homo sapiens
tgcaagattagtggcctacagtatttcccctaaaccataataattttgagcaatgcagaggtatgatgaaaacagtgcttatggaagaatattctagcagyaatttgcaggacagatccaagagaagaaattcagagagaacaaggaaagagagattattgagaaactccaatttcaacatcttgaaaactcaaattgggt

SEQ ID NO: 9657 - DNA, 201 bp, Homo sapiens
tgggagtaggaaagtgagaaataaggttagaaaggtaggcagaggcctgatcatgaagaatcttgtgcggcttgtaaaagagtttagatgttattctcttataaacaacagggatccactatcaagttttaaacctgttacagctagttagataggcaagagtggacaggaaagggttctcccagccactaggactgtcag

SEQ ID NO: 9658 - DNA, 201 bp, Homo sapiens
acatacttgagaccacttaaggaaatgtgaatttagagtttactgttagcaacgcatacatgatgatatatacacattgtttaaatgacatacacaaaatrttcttatatgctaacaaaagtatgaataagttctattttttttaaactgggaataatccttattcatttgatgtgatttgacaatatactatttccattt

SEQ ID NO: 9659 - DNA, 201 bp, Homo sapiens
gtaaactcccaaatgaggcaaaaaagcatacagaaagtaaaactcctaagacaaaaattggaacagccttgctgacttgaaacagacacatgtgccagtgwgtctcaagaaagaaaatacaaccaccctcaaaaaatattttcaagacattccaacaaatggacttatttcaaagaacatttactgaatgcctactatgct

SEQ ID NO: 9660 - DNA, 201 bp, Homo sapiens
cattgttaaataataatcagccatatggaaaagtatgttcatgcacagatgttcctcaaagcatttataaaaataaaaattagaaagactaatgttcaacmataaattatactaaaacccacttccttttttctgaagagtatttaatgactcaagattcaagtgcggctagggtgatcttttcaaccagtcctagctgcc

SEQ ID NO: 9661 - DNA, 201 bp, Homo sapiens
aaaattaaacaataaaattataagtaggtgtttaataagtcagaggagggaaaattttctaagcataaaagcagtaaaacagatcataaataaaatgtctrtaactttgactcctggtaaatttaaaactttatatagaaacaaatacaccagaaaaaaaatataaaaatattttcgataaatgtaagattgatctctctc

SEQ ID NO: 9662 - DNA, 201 bp, Homo sapiens
ttacaatgcttctagtagcaggggccatggaaataaagaaatgaaggagacagggcacatctaataaagacaagaaagaaataaacacattttcaagaatkcctgaaaatttcaccatggatccattcctatctttgatactcggtagctgatggttgtaaataaaggtagactagagcctccttttcttgcacaacaggt

SEQ ID NO: 9663 - DNA, 201 bp, Homo sapiens
gaaggaatgagggtgaggagaagatgccatggcttccagctttcagaaggtacaggctactgatggaatgatacagagattcttcttccccctaaagacaytgccccttataagggctacccagcaaaccccgatctgagagtaaaaaaaggaagcctcctaggcaggtccttaccatttcataccgctaatgaactatga

SEQ ID NO: 9664 - DNA, 201 bp, Homo sapiens
gcacttcagagctcctgtatgtgttgatcattgaggttgccatagtgaatgtgaagaagtcaactcaagttcagggaaaaggagagtggaactgcctgccytttatatccatgcacatcctcaaatgttaagacataaactaatcatccaacattcaaatttgtttccaagttgcatagtttgtcttattaacaaaataaa

SEQ ID NO: 9665 - DNA, 201 bp, Homo sapiens
ggggagggggggcaggaaccaaactcaattctataagcacttggcagttatttcttgcctcattaccattgccttatctttctttccctctaaaaaaaaakggatttaaagtagctaaatatgtatgcaatgataaacttgcttcttggagccagaggaactttccgaaggtccactccagaatgggatgtgagatgtaca

SEQ ID NO: 9666 - DNA, 201 bp, Homo sapiens
agattggacaatcctacagtataggatggggggtggcacaggaaaagggcatagctgctttcaatctgagtcttaaaagataaatagatgttccctagcasacctcagcagagaacagatcccgagccagtaaagaacactatgatgaaaggtgcagaggtataaaggagcctggcatgttctggaagctgccaggaagga

SEQ ID NO: 9667 - DNA, 201 bp, Homo sapiens
agagagctactcctttgggccttgcctgtcctcccagccacaagcattcagcgcccatctgatgtcacagcctcccctgacttgtgcttatgctgtgttgstgcccttctgtgttttctctccacacaaattcaccttcagggttgtcttcccacacaaatagggaacatcccataaaaatgctgcagccaccagctcagc

SEQ ID NO: 9668 - DNA, 201 bp, Homo sapiens
tctcaggcaggatttttagcttaccccttagtgttcctgcagtcctttttgtttggctccactatagacttcgtcatgttattgtgtaattatttgtaaaytttgtttcactatctgtatccaacttgaggacatcctcttatttgtattttgtatcctcataaatggtactccacatataatagaatcttaaaaactgct

SEQ ID NO: 9669 - DNA, 201 bp, Homo sapiens
ctcactgtatcctcataataatcgtctaatttacaaaatgaataaacaaaagctcagaatatttaagtaaattccccaagctcacatagctaacaaatggygcaaagctagcatttcaaccatctctgcttgactctaaactattctcctacactatttcctttagaaccatgccaactatgggatcattttacattcttc

SEQ ID NO: 9670 - DNA, 201 bp, Homo sapiens
atgccatacttgcgtattattttaaagtttggtgctccttaacgttcccatccacgtgtactccagatcatgaaaacaataaaaatactaaataagcccaygtctttcaaaaaaaaaaaaaaacctgatttttcactatatcaccttagattaaaatagtaagttctcactttgctcaggtactgtggtaagaatcaacat

SEQ ID NO: 9671 - DNA, 201 bp, Homo sapiens
accatcagttctcatgagaactcactcactatcatgagaacagcgtggaggaaatcccatgatccaatcccctcctgcctggcccctcccttgacacgtgrggattacaattcaggatgagatttgggtgggcacacagggccaaaccatagcataagggaagaaaccaatacttacaaagggtaagtaaatggagttcaa

SEQ ID NO: 9672 - DNA, 201 bp, Homo sapiens
caagatatgtataaaagtcacacaaattttaaataatttaaaacaaagttatgcagaaaactcacataaattttaagcatttttctaattgtgcttataartaatagtttcaaaagcagatatgttacaataaacacatattcagagtaaattaggccttaattatgtttagcaaattttatgtcctcattaaaaacagaa

SEQ ID NO: 9673 - DNA, 201 bp, Homo sapiens
tagcattcctgagctaaatatttaaaagaataaaaaggaaatttaagaactaaagatagaagaatatattctttctgttgtttttgttactctattttttyggctatgtttgtatggttttagtcatttatttagggcttttaaagaaatgagtgacatgaaaccatccaactccctcttgaagacctctgtctccaagat

SEQ ID NO: 9674 - DNA, 201 bp, Homo sapiens
gcttttagaacagtttttagaacatgtaattccatattctggagaagggacatggccatggatacaacctctttcttctctcccgttccctatagaatctwattggtgagaagtgacagaaatttgtcaacaacccattgcagttttgaaggcaaagaattaaaaataagtaaatctatgtcatcgctattttaaaactaa

SEQ ID NO: 9675 - DNA, 201 bp, Homo sapiens
tttttttttttgagacagagtctcactctgtcacccaggctggagtgcagcagatctcgactcacttcaacatccgcctcccgggttcaagctattctccrgcctcagcctcctgagtagctgggactacaggcacaaaccaccacacctggttaatttttgtggggctttttgggaaccagcccttgtcccaacaaacca

SEQ ID NO: 9676 - DNA, 201 bp, Homo sapiens
ttgagtttcattcacatttgaatacccagcatctaccacaaagtccaacattgagcagacaatgtgatgatttaaataattgcttcacttgcacaaatttycatgaaaacagaagcaaacagaaagtagaggggctataaaattaccaaaaagcaaataatccacaaactaatcagactaaaaaataacagaaatttcgtt

SEQ ID NO: 9677 - DNA, 201 bp, Homo sapiens
atgtattaatagatactgctgctataaaatgacataaattatagcccttgatctgtttctgtaaacaatgccagcttcttcaggttattggcaactacccytaatatacctagcccagatcctttcataaagtcaagtgctatatttccaaaataatcctatgaaatcatgaaggttgtgaaggtttaatatgaagacacc

SEQ ID NO: 9678 - DNA, 201 bp, Homo sapiens
ccgcctgtgttttcctcagttcttggtttctacctgcctatatcagaatttttgaggagatggatgtagcaaatgcaggaaaataaattttaagcccagartagaacattcagcactactcatggaccccgataaacaatatatcccagaatcaaaagcaataccattttctaaactccctcaatctatcccctcctcttc

SEQ ID NO: 9679 - DNA, 201 bp, Homo sapiens
aaagctgtaatacagtatagaggcttctccctggtgccacaatgggtgcaaacaactgctcagtccccttctttcacatgcaccagcacatcgagagggcyaacttaccctgccatttacttctcctctccaccagccatttgcactcatctttgtgtaaatcttcaccacatctcctttcaacaaggacaactctctcat

SEQ ID NO: 9680 - DNA, 201 bp, Homo sapiens
catttcaaatattttcagcgagtccctggtatcagcaaaacacagcaccagtttccagagggcagaggcctgtgggctgaaagctgtaatacagtatagargcttctccctggtgccacaatgggtgcaaacaactgctcagtccccttctttcacatgcaccagcacatcgagagggccaacttaccctgccatttactt

SEQ ID NO: 9681 - DNA, 201 bp, Homo sapiens
tgtggtatcacccagtctcatgattttaaataccatcttcaccttgatgactccaaactttatacctacatctccaactcctccaacttgctcggcgtacmcatctagatgtctactaggcacttcaatcataactagctccagatattccttcccctctccccacatacaccccaacaccatacttcctctagtcctctc

SEQ ID NO: 9682 - DNA, 201 bp, Homo sapiens
acataaacatttttaatacttaccagggttggcaagaataatctactggtttgggcacctaggatataaaaaagcaaaaacagattaagtttacataaggkaagcttttagaaatcaatcattaattcagttcagctgactcagctctataaaaccctaagtggcacagtcctggaactatccattggtaattttatacag

SEQ ID NO: 9683 - DNA, 201 bp, Homo sapiens
tgcttctgcatcctccacaggatcaggtccagtgctaagcaactgaagctgctgaatggacaagtatctcggcagggtatttaattctgcaagttccttaygtctcctccttccattcctttagctcatcttctgctcacttaaactgctccataagacttccaacaaaggccagcaaaacaccaagcaaagaaagcgaaa

SEQ ID NO: 9684 - DNA, 201 bp, Homo sapiens
aaatagtatataatatttaaaaattttatatgtacatttatatacatgcatttatgcaatcagaactttgtgtctatatctattcctttcctaggaagaayataaattctttgcggaaaggggccatgttttataattaatgacaatcctgtgcttaatgtcagataagaaatgaaattggtaatgaaagaaagatttctt

SEQ ID NO: 9685 - DNA, 201 bp, Homo sapiens
ttgtctataaagattaatcacaattattaatagggagtgaatgatttaaatgtgctaacaagctacaacacaaacctacagttcactctttcttggatttsaataaaccccacaatatatgttttcaatattgggagtttttctttgcttctttattgcaataacaaacactaataatttcaccaaaaaaaaaacctctca

SEQ ID NO: 9686 - DNA, 201 bp, Homo sapiens
tagtggtgccatcacagctcaccacagtcccaagctcctggcttcaagtgatcctcccacttggcctcccaaagttctaggattacaggaatgagccaacrcgcctggcctacatatattagctcacgtaatgctcacaacaacaacgtaaggtaggtcctcttattcatttccttttacaaatgaggaaactatggcaca

SEQ ID NO: 9687 - DNA, 201 bp, Homo sapiens
ggaatttaaaaagaaagaatgtcaatgcatacataaaaactgtatcatcacttattaattcatgtagcatttattaagcacctactacccactggactatkcattaagttcctttccagtgcaaaagggctatagagaatatatataatatacctttgaacatggctctgaaatttggacctggtgaagtagttacacccg

SEQ ID NO: 9688 - DNA, 201 bp, Homo sapiens
tggtaatttaaaattcatacttcaggagagaagtttcatgcacagatggacctttatctacctggggtgtgggttgtagctaaaccaggaaagtcaatcakatttccaaaagatggcatgggcgcatgatgggttgtgaaggatagcatcaaggaggatgattagcagtgttaaatgaaagagaaaggtcaagtaaggtaa

SEQ ID NO: 9689 - DNA, 201 bp, Homo sapiens
aaaatcttttctgtctgaaattttataattttggggaactctatataaacaacatcaaacaacaccattgacagtattttcaacaggaaagtatttaatgwtgggcaacttgctgtttacttcctacatatcccatcatcttttgtatttttttaaataacttttttttggatttttaaagtaactttattctgagaggta

SEQ ID NO: 9690 - DNA, 201 bp, Homo sapiens
gggaagcagaggaggcctataaactggtacatggagagaaagaaggtcttcaagagaggagaaaaaataaaaatcacagagcttacaaattacaaaagtgyttcactatttacttatgagaagattcctgagcagcatacaatcatctgccttggagagtgaacacacctggtatagggtgagagctgcttcttaatatta

SEQ ID NO: 9691 - DNA, 201 bp, Homo sapiens
atgtattgtgtaatcctagatctttttatatgtttattaaacaattcactaattgtttttaagacactgctatatgtaataaatctgcacaaaaatagtayataatatttaaaaattttatatgtacatttatatacatgcatttatgcaatcagaactttgtgtctatatctattcctttcctaggaagaatataaattc

SEQ ID NO: 9692 - DNA, 201 bp, Homo sapiens
aggcagagccatagaatatttttcttcctacttctgaaaatccttggggaagttaggcttagtttgtcatattttaccaaaaaaaacaaaacaaaactgastatttcaatattaagtatttatatttgtttaaaacgtaatttcctatatatacagaacatgtattgtgacatgctttgcacaagataacttacaatttta

SEQ ID NO: 9693 - DNA, 201 bp, Homo sapiens
aaaatgacttatgtaaggacagagtacattgaaataattacctaggaacagacactgagaatatatgactcttctatttgactagactaggaattttcaaygatttcctattgacttttataacgtaaaagttaaaaaattttatgtccttttaatgccatacttgcgtattattttaaagtttggtgctccttaacgttc

SEQ ID NO: 9694 - DNA, 201 bp, Homo sapiens
gaggcaggacacaaatccagatctgtgccactgtagaaccctcagtctataccaccacacagggctaccgttggagattaaaagtgctattatgcatgaayatgtttaatacagataaaatttaaaaagatctctccttctctttctttcctcattactcctttattgccgtgaagcaggtagtggcttaaatttaatgcc

SEQ ID NO: 9695 - DNA, 201 bp, Homo sapiens
ttctctttctttcctcattactcctttattgccgtgaagcaggtagtggcttaaatttaatgccttaagagctgtatcatctggctctcccacattcttaycctgacctttcctttaaggatggcacctttcttcaattctgtccccacaaaacatgctgtgttaggttctgtttcctcagttctctaatccgataaacca

SEQ ID NO: 9696 - DNA, 201 bp, Homo sapiens
ctccagttcctattttaggttcacttctccacatcaaccattttggataccagagaactatcaaacagaggatcctacaaatggaaaaaggacaaggtagragaggtggaaaacctaggcacagtatgcccaaggatgaaaactgtctgaaacttgttgcacacaataatagatgtacattttaatctgctaaaaccaagc

SEQ ID NO: 9697 - DNA, 201 bp, Homo sapiens
atcccacttcccacctgagaagtgagcacagaagccaggctggccaatcaacagagcactctggctgcagtgattgcttcagagaagagcacatggtctakgctaggccaattaaagctctccttgggattctgctggatttactgagagaaagatgttctattttctctgaattaaccagctgtggggacaatgtacatg

SEQ ID NO: 9698 - DNA, 201 bp, Homo sapiens
ataacttaggtgaaacaggccaattccttgaaagacacaaactcacacaggagaaatagataataccaacagacctgtatcagctaaagaagtcgaattartaattaataaccttccaaaagaaaacatcaagcccagatggtttcactagtgaattctaccaaacgttcaaggaaaatataatccacaatttcttccaga

SEQ ID NO: 9699 - DNA, 201 bp, Homo sapiens
cttcctaaagttctctatagaaacttgtaaatgttttgctgttagcctgtaaatgttgtaatgttgtaaatgtaatgttgtaaatgttgtaaatgttacastgttagcagtgtaaatcactgctttaaattcaatacataaaaagttggtgcttcaatatgctagaaagcatttaggtcactttttacttgctacaaaaca

SEQ ID NO: 9700 - DNA, 201 bp, Homo sapiens
ctccgcccttcccaatagtttggctgttccaatttatcgtgaaacctatgagtcaaattctccacattatgctcaacctaaggcataatgctcctgggtgrgcattataactgacagctctggaatcaggctacttggatttaaatcctgactcttaaacacacatcctgagtaagtttcctataaacctttggtgcttca

SEQ ID NO: 9701 - DNA, 201 bp, Homo sapiens
cccacactgtctgcaccaagttttttcaccctctccccccatggggttattccagactgataaaatcagacacggaaaaatgcatttttgggggagtcttktgcctgttcagttgtgacagataatcctaggataaaacgtacccctacagagcggggagctttccactgtgggggttcaaagaagatgattcttcctgga

SEQ ID NO: 9702 - DNA, 201 bp, Homo sapiens
ggcttgaaattctccttgccagcacagcagtctgaagtcgacctgggatgctccagcttggtgggggagggaggcttgagtaggcagttttcccctcacartataaacaaagcctccaggaagttcggactgggtggagcccaccacagctcagcaaagcccctgtaaccacacttcctctctagattcctcctgtctgtg

SEQ ID NO: 9703 - DNA, 201 bp, Homo sapiens
gaacagataaacaaacatggcatgttctcacttataaatgtgagctgaacagtgagaacagatgggcacagggaggggaacatcacacatcagggcctgtygaggggtggggggcaaggggagggattgcattaggagaagtacctagtgtagatgatgggttgattggtgaagcaaaccaccatggcacatgtataccta

SEQ ID NO: 9704 - DNA, 201 bp, Homo sapiens
tgggttgattggtgaagcaaaccaccatggcacatgtatacctatgtaacaaacctgcacattctgcacatgtatcccagaacttaaagtataattttttwaaaaaaaagaaagaaaaaataaagttttcttccttttaatttgtagagccagactgatcaactatttttaaggtttctcttcctaattgtcattcctccc

SEQ ID NO: 9705 - DNA, 201 bp, Homo sapiens
ttctgcacatgtatcccagaacttaaagtataatttttttaaaaaaaagaaagaaaaaataaagttttcttccttttaatttgtagagccagactgatcamctatttttaaggtttctcttcctaattgtcattcctccctattatctgcaaacatctaataaaggctaccacacatatatatatatatttcctttcgtat

SEQ ID NO: 9706 - DNA, 201 bp, Homo sapiens
gcatttgtcatcatctgtatcatctggccttaaacaaatgtgttataaaagggtcactgtcatatctattcagttttaatttggctgctaacacccagcayacttgaactagaaaaacactcagaaaaaaaaaaaaaaaaaagcaaatttttgtttcaatagtgaattttcattttattttcattttacctttaatcttaa

SEQ ID NO: 9707 - DNA, 201 bp, Homo sapiens
agtgagcattactgcctgagctctgcctagagtcagatcagcaagggcattcgattctcatagaagcatgaagcctactgtgaactgtgcaagcgagggawctaggttgtgcactccttgtaagaatctaatgtctgatgatctgaagtggaacggtttcacccccaaaccattcccccagtactcggtccatggaaaaat

SEQ ID NO: 9708 - DNA, 201 bp, Homo sapiens
catttcttgattagaaaacatgctttaggatctatttatctaaaagagtacattccttgtatttaaactctgcataaaaacatggaataattctcgatgaytgatttagtgcttagctgataatagtcctaaaatacttgtaaactgtttaacattatactacttatttaaatcttaacaaaaatatttactgagtccctt

SEQ ID NO: 9709 - DNA, 201 bp, Homo sapiens
aacagtcaaaggccaagagttctgcctcactgttgtttgtgtagacaagtaaattgactattaatatatcacccactggaattaaccaattctccttacakatttctcatccatcatatttacaatttattgtaagcaaatgaagactcaatgacctccatatgtaacttggataaactacatcttacccttaagccaatg

SEQ ID NO: 9710 - DNA, 201 bp, Homo sapiens
gagaggattacacaactaagaatcatcaaagcaaaacattactttacaaaatgcaatgtatacatattacatctaccaataagtggcattttagaatcagragaatatcagagttgaacaaactgaggccaagttgaaggagtagcccaaggggatctactgaaagaggtaggatagaatctagttaaaatgtgctttata

SEQ ID NO: 9711 - DNA, 201 bp, Homo sapiens
gcccctcagtcgaattctttcttctgaggaggcaagaattgagattcctgtagacctgtacagattcgccactggtaactcagataccttcccctggtgayaaacccatgagtaaaatgatcagatctacatttttggaagattatgttgaagatgagcttgaaacgattcaaaactgatggcaagaaaacacctagaaga

SEQ ID NO: 9712 - DNA, 201 bp, Homo sapiens
aagagagaaaaataaaactacccttgcaaatgtcttattggtcccaactgagtgactaaccccattcctgaaccatcactatgtggtcaaaggcatgggayataattgatgaaaccatccaaactctgtaattaagaaagaggaaagtgtggtttctcaaaggagatccaaggccacagaaggaaagagaaacgatggctg

SEQ ID NO: 9713 - DNA, 201 bp, Homo sapiens
tgagtaatggggggaaaaggaggaaagatggaaagctagtggggtcagatgatgaagatctttatgggacagtttttactctgactgatatgggaggtcaytggaggccttggccaaaaggaggacataatctgatggtttaaaaaggtctttttggcctgttgtgctgaatatagagtgaaaggggccggagctagggtg

SEQ ID NO: 9714 - DNA, 201 bp, Homo sapiens
agtgaaaggggccggagctagggtggaggcaggaaaaccagacataaggctcttgcaataacccaggtgagagacaactgtgggaagaccagagtgtggtyactttttgactgtgttaaatctgagaggcctattagtcatccaataagtgtggagtccaggggataggtgtgtactacagacagaaatatgggagtcttt

SEQ ID NO: 9715 - DNA, 201 bp, Homo sapiens
atcatttagttaagatggttactgccacatctctctactgtaaaggtacatgtcccccctttatagcagtaagtaacccaggggtgaagatgtggtaccawgtggctgtcctatttcccaataatttttcacaatgggattagtattccttgatcatccttgctttaattattccatatgagactttaaaatagtgatttt

SEQ ID NO: 9716 - DNA, 201 bp, Homo sapiens
gatttagactaggatagtagaaggagagatgggaagaactccaggagattacatggaaaagaaatatttggtaattgattgactgtgtgtggggacgcagkgggagagaaaagagaagacctcagaattataactgtacctctctctgccttgggcactggaaggatagcagggcattcactgaaaatggtaacttagcaa

SEQ ID NO: 9717 - DNA, 201 bp, Homo sapiens
taaaattataaatcaggccaaagctctctggattagaaaatgtttcataaccaggtagctaccacaacagacaaggcatgagtggcttttcaaggtgcagmctcctgttaccactttaatgttagcaatattgacgcttaaaaaaggaaacatttgaaggtcaaactgctaaagttcactacaaaactctgaatcgctcct

SEQ ID NO: 9718 - DNA, 201 bp, Homo sapiens
cataattcaaattatgagtggccattataataagatgattggcagtttcgaaaggcacagaagagacaaccatgaaaccgatttacaaacattaaggtacragaagaattctccttctcttctcatcataactcctcctctatacctctccaaaggtctcagatcatccttttttttaactggtaaggaggaagaggtgta

SEQ ID NO: 9719 - DNA, 201 bp, Homo sapiens
gtaaaatgttttgttctccagagattttagataaaaataggttttattactcctttgggcaaagaatgtcattattaaattaaaaaaaaaaggaagcagawcaaaactcagcacctgttctatgacctcattttggaaaatatgggggaacgagtatcatcacgtgaatacatatatataatgcatgtatacatgtaggga

SEQ ID NO: 9720 - DNA, 201 bp, Homo sapiens
ataaaaatatatctactgaaaacacatatcccataaaatatgtaagtaaaatattcatgcaacagattatatactatacatgaacataaaaaacaaaacaycttttaaactattctaagcaatgtagttccatttaaaaacaaagtattttaagtaatgggaaggttcttcattctaaaaaaataataatgtctcagtcta

SEQ ID NO: 9721 - DNA, 201 bp, Homo sapiens
ggatatgagaagtgaaaacgtggtacagtgtagccgcaaagtatatccatagtatactttgtagccacacgtcaggaggaagttacctttatgcacccctyaccactgcatgcaaatttgatattttctctacatgcttttggaaaatgtgctaataactaaatcatcaacacagtacttgcaaattgtttttaggccttc

SEQ ID NO: 9722 - DNA, 201 bp, Homo sapiens
tgattgatactgtatttttgtaaatggtcctataaatgatcttctgaaatagctatcctcaccaggacatggagaagatatgctcagttaaccgaggttaytgcatcacaatagggactttgtggtctctgaacttaacagacatatcttatacaaaactatttgtggtagtggtggtagtggtgcataattttcaattat

SEQ ID NO: 9723 - DNA, 201 bp, Homo sapiens
ttcagcatctgatactgcatgaattactagctcaaattactgtgtagttttaacattagatcccactaagttccttttaatggtgtatctttgtgaagctrgatattcagcagatgcagtggttaacaactaaacatggtacaacaatcaatgtaaaacaaaaaatgagggtgtggtggtgtgtaatcttattccaagatt

SEQ ID NO: 9724 - DNA, 201 bp, Homo sapiens
taatattttctcctgcatttatttctgcccccaaccactgtgtaacagttttgcctcctgccctttctgttctataaatgttactcaacttcattcatgcrcacctttattcattcagcaaatatctgagtacctactacatagcaaggtgatattctaggcacttgggatatagatcagtaaactaaaaatgcatagaag

SEQ ID NO: 9725 - DNA, 201 bp, Homo sapiens
ctgaccaaattggaaatctctctagagccataatgcttccccagtgcctgtcaacatgccctatacatagtagacccatggtaactgttcatggaagccamtgctaaagacctctgacatcttaaaaaaaaaatctagaatactttttatgaatgaaactttacattgctgcccagattgcaaacctctgagccaatattc

SEQ ID NO: 9726 - DNA, 201 bp, Homo sapiens
agaaagatatgcgttatactaaatcaagtgataaaagcaaattaccaaacagcatatatctagctatggtcctgattaagtgttcagttgtaagtagcatrcgtgtgttgaggaatgaattcggaaggatgctgcagggtatattatctgttgatgacagaattttcaacatcatccctatactttcaagctctttcacag

SEQ ID NO: 9727 - DNA, 201 bp, Homo sapiens
ggcaaacacaatagacttactgcaaacagcgctgatttaaacaaaaatgtagtgaatatagataaaggtgtcaagtgccatgatgtagtaatgacacagarcagccaggcagggactacatgacttggaagtttaaaagaaagtaaataccaagtgttttttgtttgtttgtttgtgtgtgtgtgtgcgtgtttacgttag

SEQ ID NO: 9728 - DNA, 201 bp, Homo sapiens
gatgatcctctggcatgccattgtgcccagagtgtatacacaaccaagagtacaaaattgaaagtacactgctaatcgctcacagcaacagcaataaaaaytttaaatgctctaaattataatcagataactggaaaaatatgttcctttcccatagcaagaactcaattcatgaggcaaaaggaaggaaatgcattgacc

SEQ ID NO: 9729 - DNA, 201 bp, Homo sapiens
gggatggttggagtgtctcttttttgatcaccagtgtattcaagtacctataactagaacaagtgtctagaatcactaccttacaaggcagtgagtgaatraatgaattaatacgattcatggattaagtaggaagaacaatgtcacaagaaggattcaggagaaacatcatggacagcaagaatcaggggccacaaatga

SEQ ID NO: 9730 - DNA, 201 bp, Homo sapiens
aaggattcaggagaaacatcatggacagcaagaatcaggggccacaaatgatggttagggaaaactagacacaaaggagaggggagaaaactgtgtgacgyacaagacaagttgaggggatgtaaagtgtgaaggcagtgactggaaattcaggcagaggagaccaaactaaggctagaaatgttggtgatgatcagattg

SEQ ID NO: 9731 - DNA, 201 bp, Homo sapiens
tggttagggaaaactagacacaaaggagaggggagaaaactgtgtgacgcacaagacaagttgaggggatgtaaagtgtgaaggcagtgactggaaattcrggcagaggagaccaaactaaggctagaaatgttggtgatgatcagattgtccaaaaatttaaatatcaaactgaggtgtgcacaggcctgatcaagctgg

SEQ ID NO: 9732 - DNA, 201 bp, Homo sapiens
ctgtgtgacgcacaagacaagttgaggggatgtaaagtgtgaaggcagtgactggaaattcaggcagaggagaccaaactaaggctagaaatgttggtgaygatcagattgtccaaaaatttaaatatcaaactgaggtgtgcacaggcctgatcaagctgggtgcagaaagtcatcacggtttctgaagagaaggaaata

SEQ ID NO: 9733 - DNA, 201 bp, Homo sapiens
tgattacatttagaggaaagtaatataaatgtattgaatctggactaattctattacatggctccagtgagcctattttaatgaaatttccatgtggctgwtaagttctgatggtttacgttttagcctattcttaatataaactggaaagttgtctaaaaccctggataaatcagacaagtacaaaaagtctaagaattt

SEQ ID NO: 9734 - DNA, 201 bp, Homo sapiens
ttggatggagggaccggtaggaggatagagaggggaatatatatattatgcataatttcctctaagtattataaaccattgtaagcattatattttattayagttatacaggtaaacatataaatactaacatgttatataaagacctatagaatatttccataaatatgtaaaaacaatttcttaacagttaaactatct

SEQ ID NO: 9735 - DNA, 201 bp, Homo sapiens
tctttagttctaaagtgaaattatctactgtaacattctaagaaaatttgcaaataagaaggcattaaatatatcgttttgattttcttaatctgtaaaarccaggaaaaaaggtattaaaagtatgagaaattaaaatgttagtgctattccttgctattacactagttcatggaggataaccttaacctagttatttaa

SEQ ID NO: 9736 - DNA, 201 bp, Homo sapiens
aaatcaagtgagcactcacagtacctggttttaacttcatcactgaaagcagcactgaagaggataggaaagacagtcttgaatcatggatgccacccctccccccatctcctggtagtagctgtgtggtagagagagagaatctgtgcacatggtagagaaagagtgcagcaagcgcgaggcattgcatttaactcagtg

SEQ ID NO: 9737 - DNA, 201 bp, Homo sapiens
aatatgtatacctatgtacccacaaaaattaaaactaaaaaatttttttaaagaattatgagtaccttgataaaaaacacattgaatatatataaagaccyactagctcagaatgagacttaaaacaatagaaagtctgcccctcccctccaaaaagaaatcaattagtcattactagaaatgacatactctgaaaattgg

SEQ ID NO: 9738 - DNA, 201 bp, Homo sapiens
caagaaattaggatttattcaaggaaatttcaaaagtgccttctattcttattatcttggaattataagaactctatggtttattctttaaataattataycctttagaataaggataaattctctattctgtgaaatggctagatgaaaatattgcaaaacccaagactttcctggatgtcatctattaatattacaaca

SEQ ID NO: 9739 - DNA, 201 bp, Homo sapiens
agggtcaccaacactagcctagtgagatgatgaatattttatacaaactagaagaaagtacccctccagggcagatgtaaaccctggtgagatcccacagygagaagacagcagttgcatttcaacctctactagcagaaatctttactcagtgtacaaaatgcaagaccatatccagcccttggccttacaaatcatact

SEQ ID NO: 9740 - DNA, 201 bp, Homo sapiens
gactgaaatacagtaaaagcagcaaatgctattccaccccaaatgactaaaaatgtcaaaccccttcctaagcctcacctgcaacacgagtccaagctgtrcccacaaaacccaaaaagcccacccacaaagcccagcatggctccacttgccaggaccagtgcatcctgcacttgctaaggcctaaacacccatcacaaa

SEQ ID NO: 9741 - DNA, 201 bp, Homo sapiens
catagacaagcgaagttatagagttctaagagttcccaaaagaactgtgaggaaagccctataccatgagaagatcagaggatggtgtgggacaggagaakggaaagaatctcacatgattaccaactgtccactacatctctggtgctgtgctaggtatcttgcccatctgagttcacttactcttcacaatactctgca

SEQ ID NO: 9742 - DNA, 201 bp, Homo sapiens
tcaactccattttctcttcgccccctaaaagtgggaacttcatatgatttatctctatgcctttgtgccctgtacaaatgtctatagagagaaatacaaamgcaaaaattgacaaatgggatctaattaactaaagagcttctgcacagcaaaagaaactctcaacagagtaaagagacaacctacagaatggaagaaaat

SEQ ID NO: 9743 - DNA, 201 bp, Homo sapiens
gagaaaaagaaacacttatacactgttggtgggagtgtaaattagttcaacatttgtggaagacagtgtggtgatgcctcaaagacctaaagacagaaatrccatttgacccagcaatcccattgcaggatatacacccaaaggaatataaactgttctagtataaagacacacgtacacatatgttcactacagcactat

SEQ ID NO: 9744 - DNA, 201 bp, Homo sapiens
ttagtggtataatgtacacatgagcaaaattaactatgtatccagaaaagcattacccacctaccaaactttagccatgcccattcactctaacccaaacrgctcccttcccatccactgttttataagggaaaatatgaagtaaaacccgtactgtatagactaaaagcaacacagggtcagggattgagtttcattcac

SEQ ID NO: 9745 - DNA, 201 bp, Homo sapiens
tagcctcgctgacaagaattcagttcgctcttaatgttcttattctaagtttggctctaccacaaaccacttgttggtgtaagttactaaacccctcttakcttcagagagtatccaccacatggggataaataacagtgcctgcctcacggtgttggacaattagatgagataatgcatggaaagctttagtaactgcct

SEQ ID NO: 9746 - DNA, 201 bp, Homo sapiens
gcattctaccagacactgtggcacaaagcagcatgtgctcagccacacctgggagaaaagtcagggaagacaatacaaagatgactcttgaactgaatctwcaagtagacaaatgaaaaagggaacttcaagcagacaaaaaggtatatgcaacagcacagagacatttaacagcatagtcttcaagaaactgcaagaagg

SEQ ID NO: 9747 - DNA, 201 bp, Homo sapiens
acactgaccctgctgttcctccagtatgcctgccacttaatgacctcaggagctttgcacttggtattccctccaccaggaatattcttttttccaaacaktgacattcctgtgttcctttactcgcttcaggtcccacctaattgtcactcccttggagaggactttcttgactaccttctataaaattgtattacattt

SEQ ID NO: 9748 - DNA, 201 bp, Homo sapiens
ctaaaatctaacatatacagacaccaaatttcttagatattcactggccaactgcattttatttaactgtattatataataagaggaacatgttaaatgtrtaactaaatatgattaatgtttacctctttaacctatcataaataaaaacaaacactaaatcagcatgaaaaaatatacttatttttgaactgaagatca

SEQ ID NO: 9749 - DNA, 201 bp, Homo sapiens
tttttgatggcaaaagagggcagaaaattagactaggataagttaaagatggatacaaatcaggggtacacctagaaagctaaaatgatatgctccgagaygttacacgcaatttgagagactgtaggaaaagcttgagatactgatgagccaggatttccccttttatagaatacagcaactctcaaccacacagaatcc

SEQ ID NO: 9750 - DNA, 201 bp, Homo sapiens
cctttttaggtctgtgaccaagtccccagaggacacccattcttctgagaatctccagcacaacgacttatatgctcagtgtccttgggactaggaatccrtatgtaattattgaagtgtaagagggtaactcaagagattacatgtatgaaaaaccttgtgtatgaaactgtgatctcttcagttcacactgaagtacaa

SEQ ID NO: 9751 - DNA, 201 bp, Homo sapiens
gaagacctcactttccccctagcctggacctctttgttctccagatatgcattcctaactgctcctcaggcatctcaaatgcagcatatacaaaactcaayttccatgtgtttcctgacatatctgattcatttactccatcttccaaactgggaacttcaaaatcacaatgaatttttccctctccctcacaccctctac

SEQ ID NO: 9752 - DNA, 201 bp, Homo sapiens
caccatattggccaggctggtctcaaactcctgacctcaggtgatctgcccacctcagcctcccaaagtgctggcattacaggtgtgagccaccgtgcccracaacgcattcaataaattaaaagccgcatagcaagctcctaaataagaaaatggaatattttattataaatacacaacctctctccgatttacaaattt

SEQ ID NO: 9753 - DNA, 201 bp, Homo sapiens
agccaacgataaggaataaaatcgacaaaattgctgccttcatgaggcttatattctgcatttaaatgtaaaatttagataggaacctgatatttattttmaacaaaaaacaaaaatacaagtatttggagaaaatattgataactacttatataatctttaaaggaaatgaaagcaaacaaaagatggctggcctcattt

SEQ ID NO: 9754 - DNA, 201 bp, Homo sapiens
gatggagctgcaggccattatcatacgtgaattaacacaggaaaggaaaagcaaataacacgttctcacttgtaagtggcagctaaacatttgataaatgrtgctgggataactggctagccatatgcaggactgaaggtgaaccccttccttatatgatatacaaaaatcagctcgagatggattgaagacaaatgtaaa

SEQ ID NO: 9755 - DNA, 201 bp, Homo sapiens
aaattttaagcccagaatagaacattcagcactactcatggaccccgataaacaatatatcccagaatcaaaagcaataccattttctaaactccctcaawctatcccctcctcttcaaattcccctctatttatcttcacttaacttgccctataattaaaaaaaaaatctataatttcattaagcagtaaaatttaaag

SEQ ID NO: 9756 - DNA, 201 bp, Homo sapiens
cctggaatcggggatatacccaagtttgcattgtgctgcagttccaggctttgtctctagttgccatattgctagaaatgaagttgacccatttatgaacygcctgtgttttcctcagttcttggtttctacctgcctatatcagaatttttgaggagatggatgtagcaaatgcaggaaaataaattttaagcccagaat

SEQ ID NO: 9757 - DNA, 201 bp, Homo sapiens
ttcaaacaaagaaagaaaacttgtagctgctaatggtcaaatagaaaatgaacaaagacaaagcaggtatattaatgttaaaaataagaaataaagtacaktctatagagagggttactttaaaaattcctacgaataggagtacagatagtttgtctcatgtccaaatatctgatatatgcattccatgctattaatggg

SEQ ID NO: 9758 - DNA, 201 bp, Homo sapiens
atcccagcactttggaggatcacttcagcccaggagttcaaggctgcaatgggttatgatggcatcgctgcactccatcctgggtgacagagcaagacccmatctctaaaactataaaaaataaaaaaaaaaactactactgtcctttttgagctaatttttagtttttagacaatgaaagcatatttttctctctgcttt

SEQ ID NO: 9759 - DNA, 201 bp, Homo sapiens
cagtggattcctacactttgaaaagtaactcagcattttccatgcttttgttatagaacagaaaataatcagaacatgtaaaaaatatcagataactcacrtggtaacatgcaaacccaactagtactatatattcccaggatattatatttatatatgtattctgatatctcatttctatgcatgtattttaataccaat

SEQ ID NO: 9760 - DNA, 201 bp, Homo sapiens
tgatctttccaaatctaggccctacatggttcaccttttccacataatataccttctaactccagtgtctcctgccactgcaggaaagggcaatttgtccrgactaccatgggaaaaggcagggaccctgacatctatctcttgttctgcatacagattttaggatagttccccagtttgcagtcccaaatctcattccta

SEQ ID NO: 9761 - DNA, 201 bp, Homo sapiens
tccattcaataccatttctaattctttgtatgttgcctgatttttttctccctagaaaccttcaaattctttctgtattctctatatactgcaaaatttcrtgataatgtgttttttatattgtccttgcctttcagaagtatcttcaatttggagccacatgtccttcggttctgagaaatttctgtatcatttctttga

SEQ ID NO: 9762 - DNA, 201 bp, Homo sapiens
acgttgagcatctctaatcttaaaatctgaaattcagaaacctccaaaatctgaaactttctgagagtcagcatgtttccactaaaatgcagattatagtmaaaatgcagtcgaaactttgcttcatgcacaaaatttaaaatattacataaaattaccttcaggctttgtgtataagatatatataaaacataaataaat

SEQ ID NO: 9763 - DNA, 201 bp, Homo sapiens
tgataaaaagaatgagttcatccactactctctctctgtctctcccactgcttcctcgctttgtgatatctcctgccatgttattatgcaatgagaaggcyctcaccagatgcagcccctcgattttggactgcccaacttttagaaccatgagacaaataaatatatcttctttataagttaaccaatctctgtggtatt

SEQ ID NO: 9764 - DNA, 201 bp, Homo sapiens
gaaaaaaagaggaaagaaaggtatatttaaaatctgctgtatcatttaaacacaaaccaaaactctatctaaacctgcaaacaatttacaatgaagattaygattcgagcaatataaaacttagagatttataaattagaattttcaggattttgttgcaaaattagaatatgattatctttaaataacttttcagtgagc

SEQ ID NO: 9765 - DNA, 201 bp, Homo sapiens
attgtaaggactcaatataaatttgctcaacaaatgaacagaaacaaaatggaggggtagcttcagattagttcagctgcctcttcagcaatttttatagytatttactaaacttgataaaagcacttttctgatattgagattttttttccagctccttgtttttcttttcataattacatcctttgctaatgtttgtta

SEQ ID NO: 9766 - DNA, 201 bp, Homo sapiens
acacactgtagttacagtttcagcatcctgctctatgtattgacaggatatttatgcaaacttataatagcagaagctccctggtcacacaagtggcctgytagaaagaagtgcttctagagccagtggctggtgtcagcctgctctaccattgaactaactcagaagtgatgaaccagctttctgctacgctaccagaaa

SEQ ID NO: 9767 - DNA, 201 bp, Homo sapiens
gaatagaattaaaaagggcccagtaacagtgacatttaaatgggaacgttgaggtggttatcatctcccggactcttcattcactgcctaacattatagayaacctacctgcatcatgttgttctggaagcttcttgaaagagaactcttttatgcatattagcatccacttagataatattacaccaatactgcgacctt

SEQ ID NO: 9768 - DNA, 201 bp, Homo sapiens
aaagcaaatgagggaaaaatctggctaggcattaatacaaaataagagaactgggagtaatgcttaccaaaactggctgaaattatcacatttttaaaatyaattatttccttaccttacaccagaacaattctaggttattaaaaatttttcaaaagttataagatttaaaatatgggaagaaaacacaatagaccactt

SEQ ID NO: 9769 - DNA, 201 bp, Homo sapiens
tgtgcatagaatactaaaactcaaaagagtcacaccctttttcaaattgcttttcaaactccaaacatcattttcttacaacataatatttctgttggtayatattttttcaagactactagaaaaaaggaaattttatagtataaaaactaacaaatgatctattattttaattaaattggaaggttacttttgacccta

SEQ ID NO: 9770 - DNA, 201 bp, Homo sapiens
acaggaaagcttcagaaatgccatgatgtatcagggaaatctctcctacaactgaaatgaaaattccttggcatctaaaaagtattcccacggatcatctrattcaccttcaatttactcacttctttccccactccatgtttttttctttcccagtttattctcacttgttccagtttcaggtcatagcatgttgaaccc

SEQ ID NO: 9771 - DNA, 201 bp, Homo sapiens
gcttggaatgtgaacaacataataaacaaggcagtttttcccttatcctcaaaaacttagagtctaacagggaaaaggaaaattatacaggcaaatattayaaagcattatgtgttttacattagaaaaattgcaaacgctacggaagcacaaaccaaaaggacataatctcatcaagtgttcagggaaggcacaatgttc

SEQ ID NO: 9772 - DNA, 201 bp, Homo sapiens
attaaatccattttgcaaaatgagactgtcaacaaacttatatccccacacgacatgaatacaaatgtacctagtccccttcctccgagtgattaaaattrcattttaaaatatgacaaattgtttttataaaaaaactataaagttaaaacattagggaagctcaaaaaacatgcacaaaagaatactgtctcaattttt

SEQ ID NO: 9773 - DNA, 201 bp, Homo sapiens
atgcatagtattctattggaaaggctttgaaaatatctctgggtcttctgtaacccccataaactttctctagatttttgaatccttggtaactttggatygaaaatgaatataatgaaaaaaaaatggtttgataagctctttcaccaaacatattatagctagaagaatgtaataagcagacttacatgccacatgatt

SEQ ID NO: 9774 - DNA, 201 bp, Homo sapiens
tatcagtctagcaagggagataaggcagatacctcaataattatagctcacaaatacactttcatatgatcggtcatatgacaaggtcaagggtgggagcyaactagttttacatacctgactgcacacagccatccctgctgagggcagagccagtgtcttgcaggccaatactagaaacactctgtcccagcctgatcc

SEQ ID NO: 9775 - DNA, 201 bp, Homo sapiens
ctgtcagtaccagcatctttagaaatctcagcattaagacttaggaggggctaaggagggaggatgttgaacagccagaaatgcagctttttaaacacttyagttaattcacgatgctgtgcaggcttctatttatcccttctctgaaatttttggtgcagggtgcaacacgggatttgaatttattcatcctcttccaca

SEQ ID NO: 9776 - DNA, 201 bp, Homo sapiens
agcaggcttacctcaggagcatctggcagactttgcaggatgtgactcgagtgaaggtatgcatcttgaagtcgtggaaattggagtctgcatagtctggycttatgttagacctaaaaaaaggaaaaaaataactttctatagaaagtttcacaacaaagctgcaatttagtcatctaaaccctaaattcatcaaaatga

SEQ ID NO: 9777 - DNA, 201 bp, Homo sapiens
aaaaaaattatctctggagaaaagattccctccctgtatactattttaattacaaaataattctaatctcatttggaaagttgatgctaattttttggtgktgttgttgtatgtgtggggtttcttttttgttgttgttgttttttggtttttggttttgctaagccatctacatgtgaaatttaactatataatgcagat

SEQ ID NO: 9778 - DNA, 201 bp, Homo sapiens
atttctgctagacaacaacttcgtatatcattttctggacatttctgcagttagaattatcaaaataaaatgatttaataaaatcatatattaacctatcrggaagtagagatcaaaagcattgctgactttcttaaactttcctttctaatacaacacataattgaaagacatctaactgcatttgtgaggcatctttgc

SEQ ID NO: 9779 - DNA, 201 bp, Homo sapiens
cctctgcctgaatcaggacatagaggcaaaggaagaaaaaaagaggaaagaaaggtatatttaaaatctgctgtatcatttaaacacaaaccaaaactctrtctaaacctgcaaacaatttacaatgaagattacgattcgagcaatataaaacttagagatttataaattagaattttcaggattttgttgcaaaattag

SEQ ID NO: 9780 - DNA, 201 bp, Homo sapiens
cataggcatgtcataatattttatttatgtgtatatatatatgtttgtgtatatatatgtgtgtatatgtgtgtgtgtgtgtgtgtgtgtgtgtgtgtgtrtatgcaatttgaattccattgtctttaggcaagaataaaaaatacaaacaaattactgatgaatctgccctaccttcatggcatcaagagccagtttcag

SEQ ID NO: 9781 - DNA, 201 bp, Homo sapiens
acataggcatgtcataatattttatttatgtgtatatatatatgtttgtgtatatatatgtgtgtatatgtgtgtgtgtgtgtgtgtgtgtgtgtgtgtgrgtatgcaatttgaattccattgtctttaggcaagaataaaaaatacaaacaaattactgatgaatctgccctaccttcatggcatcaagagccagtttca

SEQ ID NO: 9782 - DNA, 201 bp, Homo sapiens
tacttcaagatttgaaacaatttgcttaaatgctttccagttaaaaagtagtgttaaaaatgaagtataattacctttccaaagtcacgaacatcaaacargtcaaatgcctcgaaaagttcacttttcctcattccaaacgtctcacaacaggccgtgagaaatgtccttatgttcttcaaacagagaaactgaggaatg

SEQ ID NO: 9783 - DNA, 201 bp, Homo sapiens
ataagaaagtggtatattaaacggtgcaaaattctgcccatatgaaattactgcaagaagaagaaaaaaagtatcaacagtgctcttcaaggtaccccctyggtagagggagacgagcttgccagagcttctgaaaggactgtccaggcagaaagcctggcaaaggtttgtgggatccagactgctaaggcaaattcccca

SEQ ID NO: 9784 - DNA, 201 bp, Homo sapiens
catttttctaattgtgcttataaataatagtttcaaaagcagatatgttacaataaacacatattcagagtaaattaggccttaattatgtttagcaaatkttatgtcctcattaaaaacagaattgcaacaataaacatgacttaccaccagaattaactctgccacaattgtctactcttcccaaacattctttgtgtg

SEQ ID NO: 9785 - DNA, 201 bp, Homo sapiens
aagggggtccttcatgcagagctgggggtggtgttccagaatagttcctaatgacctgcatctttggtaaacctgaaaataagccaaacaagttttagaaytgagaaaacaatgatgcatgaagtctacatgaactttacaaaaaatgtcattattaacattaaaaagtgttaataccaccaagtccaagtaaacatttta

SEQ ID NO: 9786 - DNA, 201 bp, Homo sapiens
acccacatgaacactgccaaacaaagggactggcaacaacctccaacagtagaaacttgaaggtaaactatgttttcttcaacaacaactcctagaatgtsgttgatgtgggggtgaggggaagctggatggaaagataattacataccaaattctctatagatagctgaaactgtttaatttcacgaagggtctcattat

SEQ ID NO: 9787 - DNA, 201 bp, Homo sapiens
caactcctagaatgtcgttgatgtgggggtgaggggaagctggatggaaagataattacataccaaattctctatagatagctgaaactgtttaatttcaygaagggtctcattatctcttttcacttcattcacatattgtgccaagtcctagacaataaagaaaagggtagaaaaagaaggcacactaagattagagat

SEQ ID NO: 9788 - DNA, 201 bp, Homo sapiens
aaaccatccaactccctcttgaagacctctgtctccaagatatgtataaaagtcacacaaattttaaataatttaaaacaaagttatgcagaaaactcacrtaaattttaagcatttttctaattgtgcttataaataatagtttcaaaagcagatatgttacaataaacacatattcagagtaaattaggccttaattat

SEQ ID NO: 9789 - DNA, 201 bp, Homo sapiens
gaaaccatccaactccctcttgaagacctctgtctccaagatatgtataaaagtcacacaaattttaaataatttaaaacaaagttatgcagaaaactcayataaattttaagcatttttctaattgtgcttataaataatagtttcaaaagcagatatgttacaataaacacatattcagagtaaattaggccttaatta

SEQ ID NO: 9790 - DNA, 201 bp, Homo sapiens
ttgtatctaaggttctgaacccttccttgagagaatgatgcttgtagtactccacaagttcctttggaaaaaagaatccaacatatttttgataaggatayttttgttctcaaacacatgaactcctgagcacataaatacaataaggatgaccaatttaatgctaaattttccataggtatatggaagattaagcaaatg

SEQ ID NO: 9791 - DNA, 201 bp, Homo sapiens
gtccagctgaatgttctggctccttgtatggaaactgcagagttgtatctaaggttctgaacccttccttgagagaatgatgcttgtagtactccacaagytcctttggaaaaaagaatccaacatatttttgataaggatacttttgttctcaaacacatgaactcctgagcacataaatacaataaggatgaccaattt

SEQ ID NO: 9792 - DNA, 201 bp, Homo sapiens
ctgccctaccttcatggcatcaagagccagtttcagatttgccttctcagtcggatcagtggtatgtttgaccagttcctatttggaagatatggtttagyactactttcatcaaattaaaactaagacatactaaagaaaacatttttacaaataaaccattattattggttttctctctataatgtgataaatctaata

SEQ ID NO: 9793 - DNA, 201 bp, Homo sapiens
cttgaaattttcaacatactctattaaatcaggaaggcctttgtagatgtcttcatcattaatgctttcttctgttgggaagggcctaggaagaggagaaraaacaaaaacaaaaaaacaaacccatgagtgaacgagcaacaatcaggctgcgcacttaaccctcactaaatatgtaagttgtctgctgccaaaatggtc

SEQ ID NO: 9794 - DNA, 201 bp, Homo sapiens
tctggctgtggcattatccagttatttctcacaaagttatgtacctaatcaatctctagaaacaaaaacatctggattgataagccatatctcacattaaygtattatcatacttttccttaatgttcaagattataagtaaattacagttattagtttccaaaaagtcacctttttgttttctttatcggttgtaggatt

SEQ ID NO: 9795 - DNA, 201 bp, Homo sapiens
cacagttaaaacccacaatggacacataaattggcagtggctaaattttgcttgaaattttcaacatactctattaaatcaggaaggcctttgtagatgtyttcatcattaatgctttcttctgttgggaagggcctaggaagaggagaaaaaacaaaaacaaaaaaacaaacccatgagtgaacgagcaacaatcaggct

SEQ ID NO: 9796 - DNA, 201 bp, Homo sapiens
tagttatcaccttttctcttacatacgatcactgccaaatcaaataagaagatatgcctgggaaaaagagattgattgattgattttaaatggtttagaarcatgggttattaatttttttgggtataaagcaaccaaatgtttttttctttgcattaaagacaacaggtagtatcatacactgaaaacaacggggtattt

SEQ ID NO: 9797 - DNA, 201 bp, Homo sapiens
catactgggtccttccccctcctccttcttcttcttctttttttcttttttaattacatatatagaactcaaactactactctgaaagtaattgtcccacrttctaattactgctcaggtagtaatgtaataaacagcagtaatagctatttgttagctattttaatactaatcctcactataattacaagctaagaccca

SEQ ID NO: 9798 - DNA, 201 bp, Homo sapiens
taagtcctcatagacttctccaccttcatcttccccataaacacagtcatagagatcttcttcatcttccacaagggtttcactacaacaaaggatatcayataaggtcattttctattatgcagtaaatgcaatagctacaaatagcctactggattttagtaaaaaatccagaaaggaaataaaatggaattagtggaa

SEQ ID NO: 9799 - DNA, 201 bp, Homo sapiens
tgtctccaaatgcagtaacaagtcataattatatagttataagcaagcaaaggttaaaaaaaatcccagcagatgttacataaattattatgttaattagyctttcctaataaaatattcagagtaactttaaaaacaagtaaaagtcctacgggctgatgtgcttcctctgccttcattaagtcctcatagacttctcca

SEQ ID NO: 9800 - DNA, 201 bp, Homo sapiens
ttttgttttcataacaccccaattaaactggggttttatgtccattgtaggtgagaagattggtttaactgctcttagaagcctaatagagtaaatgatcraaatggaggaataaaataaacagtgttctaatccactagcacacaaataaatatgtaaattaagtataatacaggggggctctgctgcataatgattcct

SEQ ID NO: 9801 - DNA, 201 bp, Homo sapiens
agacaaaagattccctatggttgttttgaactctgaaaggtcatgcatatgtctccaaatgcagtaacaagtcataattatatagttataagcaagcaaasgttaaaaaaaatcccagcagatgttacataaattattatgttaattagtctttcctaataaaatattcagagtaactttaaaaacaagtaaaagtcctac

SEQ ID NO: 9802 - DNA, 201 bp, Homo sapiens
ggattctacaaacagagtattttgttttcataacaccccaattaaactggggttttatgtccattgtaggtgagaagattggtttaactgctcttagaagyctaatagagtaaatgatcgaaatggaggaataaaataaacagtgttctaatccactagcacacaaataaatatgtaaattaagtataatacaggggggct

SEQ ID NO: 9803 - DNA, 201 bp, Homo sapiens
ctgttctgttatttcccacttaactataataataattcaaaattttaaggggattgggcccaacacatggaatatctgcaatgtagttgatgcttcattartattttgttgagtgaataaatggacaataaataaactgttttaagttacatacctggaggagaaggtggtactttaaaacacgttgcataggaaccacaa

SEQ ID NO: 9804 - DNA, 201 bp, Homo sapiens
atttattcatcctcttccacatatgtggatggaaaccagcccacctaaaaaagaaaagcaaccaacacagcaacatgactttgtatctgacacttcaaagrattctacaaacagagtattttgttttcataacaccccaattaaactggggttttatgtccattgtaggtgagaagattggtttaactgctcttagaagcc

SEQ ID NO: 9805 - DNA, 201 bp, Homo sapiens
ggaaggcctttgtagatgtcttcatcattaatgctttcttctgttgggaagggcctaggaagaggagaaaaaacaaaaacaaaaaaacaaacccatgagtsaacgagcaacaatcaggctgcgcacttaaccctcactaaatatgtaagttgtctgctgccaaaatggtcagatcagtcaccatgtctaacaatatctagg

SEQ ID NO: 9806 - DNA, 201 bp, Homo sapiens
gactccaactcttagaaatcaatttagtcactatttattatattgacatatttacaaaataatacaaagtgaaataccactctaattcaccgtattacacragggctgcatacaggcaagacaaagtatatggaaaacatttacttctgtctttggtattagaactctacacaaatctgcagcatttaaattttccaaaac

SEQ ID NO: 9807 - DNA, 201 bp, Homo sapiens
cctgcttcatttcagagatgattcaaaatttcagaacttaatgctcctggttcagttctactaagttaatgcttcttttttttcccaacatgtaactctckcagtcttgtcagaacacaacttctgctatggaggaaatatttccatcaggaaagggccaagttagtgtcttaacttgactgccttgaatggggactctgg

SEQ ID NO: 9808 - DNA, 201 bp, Homo sapiens
tttggctgcataaatgtcttcttttgagaagtgtctgttcatgtcctttgcccactttttgatggggttgtttgagtaagagctatctgtgacaaacccasagccaagatcatactgaatgcgaaaaaactggaagcattccctttgcaaactggcacaagacaaggatgccctctctcaccactcctattcaacatagtg

SEQ ID NO: 9809 - DNA, 201 bp, Homo sapiens
acaaacctgacaaaaaacaagcaatggggaaaggattccctatttaataaatggtgctgggaaaactggctagccatatgtagaaagctgaaactggatcycttccttacaccttatacaagaatcaattcaagatggattaaagacttaaacattagacctaaaaccataaaagccctagaagaaaacctaggcattacc

SEQ ID NO: 9810 - DNA, 201 bp, Homo sapiens
taaaaccataaaagccctagaagaaaacctaggcattaccattcaggacataggcatgggcaaggacttcatgtctaaaacaccaaagcaatggcaacaawagccaaaattgacaaatgggacctaattaaactaaagagcttctgcacggcaaaagaaactaccatcagagtgaacaggcaacccacaaaatgggagaaa

SEQ ID NO: 9811 - DNA, 201 bp, Homo sapiens
gatctcataatgagatcaagctgtatttgggtgggccctaaatccaatgacaggtgtccataagagaaaagaagggacaatgatacacacagaaggtgacstgaagaccagcagagactggagcggtgcatctataaaccaagccatgccaaggattgccagtagaaactgggagaggagcatgggagggattctccctca

SEQ ID NO: 9812 - DNA, 201 bp, Homo sapiens
tagcctttgtcaatctttgaagaattgctacactatttgtcaccacactgaaaggaacatgctgatctacactttgttttcaaactcacccatattcccaygcttttccagtttcaacttagcactctaatatctgctgtgtctcctgtgaaccttagactctgacttctcttatttagccccttctgaggctatttcatg

SEQ ID NO: 9813 - DNA, 201 bp, Homo sapiens
ttgccaattgtatcacatcttttatagcaacatatatacacacatattttataacatatacaaaatatgttactatacacacacacatatatatacatacktgtgtgtgtgtgtgtgtgtgtatgtatcttcccaacccctgttctaggattcaatccaagaccacatgttatatgtagttgtcacatctcttggtctcct

SEQ ID NO: 9814 - DNA, 201 bp, Homo sapiens
ccagagcattacctgttcccctttcagtttctgctttcaaggaaaaatataaagttatattaaaccgacgcaaattctgttttcaaatacctctagatatyccagtgttgcttaggctaaagattctaagagtaatgaaattgtattcacttcttccccaaaacacttatttaaaaaaaataaagtgatatcagattaaga

SEQ ID NO: 9815 - DNA, 201 bp, Homo sapiens
tatggaagattaagcaaatgataatctctccctgctgtctggatgtacatgacacctacctaatagctgtccttgttactcaggccattaataatatgagttaccccctattgttattcacagatggagaacatcctgtcttcagtcagatgtagcaaatgaaaagaaacaatactaaacctcagtttcagagtagtaatt

SEQ ID NO: 9816 - DNA, 201 bp, Homo sapiens
ttttgcgcagacaaggtatagaattaaattctacttagtgaccaatattgctattcatttttttaaaatataaagcaaaattttgtgaggtctctggaatmcacacacacacacacacacacgtatacataatgtcactgatacaaacgataccgaagtttctcctagtcttattacttaaattgagtaaaatgtgttatt

SEQ ID NO: 9817 - DNA, 201 bp, Homo sapiens
gagttgatcattttgttccctagcagaagacatttcacatcaaactgcctgcttagtttaaatagattgtccaggttgctcaagaaaaaaagaaaagtaatttaaaattctactacatctttatttcttcctattttcaaggctctccctttgcctgaacatcttgcttttataagaataatattattctaactggtcata

SEQ ID NO: 9818 - DNA, 201 bp, Homo sapiens
tagcaatgtacagatggcataacttggaattctggctttaccactcactagttgcatgctctgtttctttgtttcttcacccataaaaaataacaacagtcaccaccacttttcttatataaatgttgaagaaataaaacaaaacatgtacagtacaaagcatatatagtaaatactcagtatatattagttattatgaca

SEQ ID NO: 9819 - DNA, 201 bp, Homo sapiens
agcaatgtacagatggcataacttggaattctggctttaccactcactagttgcatgctctgtttctttgtttcttcacccataaaaaataacaacagtcaccaccacttttcttatataaatgttgaagaaataaaacaaaacatgtacagtacaaagcatatatagtaaatactcagtatatattagttattatgacat

SEQ ID NO: 9820 - DNA, 201 bp, Homo sapiens
gcaatgtacagatggcataacttggaattctggctttaccactcactagttgcatgctctgtttctttgtttcttcacccataaaaaataacaacagtcaccaccacttttcttatataaatgttgaagaaataaaacaaaacatgtacagtacaaagcatatatagtaaatactcagtatatattagttattatgacatc

SEQ ID NO: 9821 - DNA, 201 bp, Homo sapiens
gtaatcccagcactttggaggatcacttcagcccaggagttcaaggctgcaatgggttatgatggcatcgctgcactccatcctgggtgacagagcaagaycccatctctaaaactataaaaaataaaaaaaaaaactactactgtcctttttgagctaatttttagtttttagacaatgaaagcatatttttctctctgc

SEQ ID NO: 9822 - DNA, 201 bp, Homo sapiens
cttcagcccaggagttcaaggctgcaatgggttatgatggcatcgctgcactccatcctgggtgacagagcaagaccccatctctaaaactataaaaaataaaaaaaaaaactactactgtcctttttgagctaatttttagtttttagacaatgaaagcatatttttctctctgctttattaaatctgtaaaatataaga

SEQ ID NO: 9823 - DNA, 201 bp, Homo sapiens
tttctcccagcaccatagtccattaacactgcaaaacttctgctatgaacatgtagtttttaaaaaacattttattgagaatatagtatccgtacaaaattatatatatatatatacacacacacacatacatacagaaatatttatatgggtctatatatatatataaataaatatatatgtgtctatttatgtgtgctt

SEQ ID NO: 9824 - DNA, 201 bp, Homo sapiens
ttctcccagcaccatagtccattaacactgcaaaacttctgctatgaacatgtagtttttaaaaaacattttattgagaatatagtatccgtacaaaattatatatatatatatacacacacacacatacatacagaaatatttatatgggtctatatatatatataaataaatatatatgtgtctatttatgtgtgcttc

SEQ ID NO: 9825 - DNA, 201 bp, Homo sapiens
agtttttaaaaaacattttattgagaatatagtatccgtacaaaattatatatatatatatacacacacacacatacatacagaaatatttatatgggtcwatatatatatataaataaatatatatgtgtctatttatgtgtgcttcttcctgaagtataccttatgaagctagatggcacacttagaagtgaagtttgt

SEQ ID NO: 9826 - DNA, 201 bp, Homo sapiens
attaaaaagttgtgtggaaaacgtcacccataataccatattatgatactaaaatcatgttaccctaaacagaagtttatcagtatcataacacaccaggragtacattttaggttacattcacctgtaatattaattgaggaaatgttcatttattctccttttatctgtgttttatattttcagaaaattccattatga

SEQ ID NO: 9827 - DNA, 201 bp, Homo sapiens
agctttcaaagacatcagctgaagtgtaatatcgccctgtaacccaagtgactggaggcagaccgtaccattctcagttcagtgggaaaggggaaacctgyacaatgcgtctaatttgtagctgtggtttatttcttctaaaaccttttagactacttagttatataaattctactaagtaaaatttgcctcttctatata

SEQ ID NO: 9828 - DNA, 201 bp, Homo sapiens
agattttggagaataggactctattaggttggtgcaaaagtaattgtggtttttatcattaaactgcaaaaatactaatacttattgaatccttaatatgwgctagacactgctctgagtgttttatttaatccttgctatgatcctttatggtaggtccaattactatccccacattacagatgaggaaaatgagacaca

SEQ ID NO: 9829 - DNA, 201 bp, Homo sapiens
caagtgctctataatggtttgttttcagcaggcagtgagatacaagtaaataagtatggtatttgggactataccactagccagacctttatatataaacrcactacaatgctacctgagtgcaaaatataaaggagtgtggtaggaaccatacactgattaagctcagaagagaaaagaataagaatgctttaaaaaaca

SEQ ID NO: 9830 - DNA, 201 bp, Homo sapiens
agatgaattttttagctgatgaaagtgtatggactggcatagttgtttctttcttcctttgtagaaacaggtgttccacacaaaagacataaatgggaacygaaatcatactagaggggtagaggaagagaccgtggttgtataagaaatgctctaaaactagatgaacatataattttccattcaaatcaggaccttttg

SEQ ID NO: 9831 - DNA, 201 bp, Homo sapiens
gagagtaaatgggtagtgactaataactatgccagaacaaatggtataaattgaactgttctgggtaaacaagtacacatggtcatcatatcaaaactcattttttttttttttacctcttttaaaggacactcttggaggtccttcaggagggaaaaaatttcactaaacaggctgccaatgtcattctgaattgttttt

SEQ ID NO: 9832 - DNA, 201 bp, Homo sapiens
gtgtaggagggctttctttggtttcttggtggatgtgtgtgggatgtacgttggtaattcattaatactaatgggtggagcagctgtcaatcccctatgcrtggatgaaattgcagactgtaactatgacatagaccaacctcaaatccaatgatttagtgcactttatgtgatgatatgaggtttttactaaccttggtg

SEQ ID NO: 9833 - DNA, 201 bp, Homo sapiens
tgtacagcatggccatgaataatgggaatataggtgaatacactgtatacacaaattagtttattgattggatgggcagatggaaggaaggaaggatggayggaaagatgaacacactgtttttggcattattctgatgaagtttgtgaggacatgcaataaaagaaaaaaaccagcaaagaggaagtgatcaggaaaaga

SEQ ID NO: 9834 - DNA, 201 bp, Homo sapiens
cacacatccctcactaggttgttacaaggatcaaagaattaatatgcatgaaagtactttgcaaatgctaaatacttgttttattttatctataatattgyttcttgattattgtcaatcacttacttcatttctaagttttccttttttatttggcccattcatgtgttattaaaatagaaatgtctaatcctatgtaca

SEQ ID NO: 9835 - DNA, 201 bp, Homo sapiens
gttttattttatctataatattgtttcttgattattgtcaatcacttacttcatttctaagttttccttttttatttggcccattcatgtgttattaaaayagaaatgtctaatcctatgtacaatcctaccactctttatatttcagtaaacttgctaagccgcaaggaacatagactctcatatcactttcacctgaac

SEQ ID NO: 9836 - DNA, 201 bp, Homo sapiens
atttggccacaactcttaagggcatgtgcacatgcatactttactgaaaccacttgcaccatcaaatcaataatcacgtcagatggaattccaaattcatrgcccactgaaagtattctgtgattgacacaaacttttagtcattatggcagaatgtagcttacatagtaataaaataatggaagaaaaaggaccacaaca

SEQ ID NO: 9837 - DNA, 201 bp, Homo sapiens
aaggaatcctgaaatgcaaagattgaacagagtacatttttacagctcaattgataattcattgtttgaaagaagtaataatgaaaatgcagatagcccaytcattcaatagcattagaaattactgttgttataataataatacagactaaattaatagctattcaaagaaagaaagttcctgatatatagtagaggata

SEQ ID NO: 9838 - DNA, 201 bp, Homo sapiens
aaataagccaaagcacctaactagtacaaaagacatttttgaaatcaaatacaaagccattgtaacatctcgataagttttctagatttttatctataggyttaacgctagatatatttgcaacaatatgatttacaaaaaccttaattacaaaactcaaaatgaaaaccaggtgcattacctatcctgagttctgatcat

SEQ ID NO: 9839 - DNA, 201 bp, Homo sapiens
acaaagccattgtaacatctcgataagttttctagatttttatctataggtttaacgctagatatatttgcaacaatatgatttacaaaaaccttaattamaaaactcaaaatgaaaaccaggtgcattacctatcctgagttctgatcattccttacatcatggaggcctccaggttagaaacgggttctctagtttctg

SEQ ID NO: 9840 - DNA, 201 bp, Homo sapiens
tcagtaacactcagcaaaataagctattatttcctaaacacataacttgcttctccagagctaagtgtgtagactctgaagattaggaaggaaccaaaaakaggtgcttaaaaactatgttctcaaaaacaattaaaacacattcccagtgggggagtcacatattttaggattcaagccataaagtacatgtcttctttg

SEQ ID NO: 9841 - DNA, 201 bp, Homo sapiens
aatgggattgctgggtcaaatggtatttctagttctagatccctgaggaatcaccacactgacttccacaatggttgaactagtttacagtcccaccaacrgtgtaaaagtgtaacaccttattttgtagctacgtttaataataccaattaccaactggtgagctggggatagtgtcaaaattaccatggtctcttacca

SEQ ID NO: 9842 - DNA, 201 bp, Homo sapiens
cccaccaacagtgtaaaagtgtaacaccttattttgtagctacgtttaataataccaattaccaactggtgagctggggatagtgtcaaaattaccatggwctcttaccaattagataatcaaatcaatggctcacattagattcatctggggttttataaaatctacttatgcctgggctcaaccaaggccatctgtgtc

SEQ ID NO: 9843 - DNA, 201 bp, Homo sapiens
cattctaatactataccagaaaatcttcaagtttataggctgctgaaaggaaatgacaactaataatgtctttttgtctagaaagaataggaggcagtagyatttagtaaaaaatggcactgggctagttgtcacagaatctcaattatagttctacttttaacattatgtggctgtgaggaatgaaggaaataatgaatc

SEQ ID NO: 9844 - DNA, 201 bp, Homo sapiens
ttttggtatcctggtgaaccacacctcctggtatttgattggtatggtccccttcctcttgtatctgggctggccatgtcttgctttaaccaaaaaaaagyggcaaaagtaattctgcaccagctctggtgtttaggcttaagaaggtccagcagtttccacttttacactcttgggagccagctaccatataggaagtct

SEQ ID NO: 9845 - DNA, 201 bp, Homo sapiens
cccttcctcttgtatctgggctggccatgtcttgctttaaccaaaaaaaagcggcaaaagtaattctgcaccagctctggtgtttaggcttaagaaggtcyagcagtttccacttttacactcttgggagccagctaccatataggaagtctaagtaccctgcgatcaccatgctgtgaggaagataaggaaccactgaag

SEQ ID NO: 9846 - DNA, 201 bp, Homo sapiens
gctgtgaggaagataaggaaccactgaagaggtcaacgtgcagaaagcctctgctgagttcctagacagaggctaacactaactgccaatcctgtggacaygggcattcgagaccttacagctgctcccaccaccccaaccatcaactgaagcagaagaaccaccttatcacccatagcattatgagaaataataaactgt

SEQ ID NO: 9847 - DNA, 201 bp, Homo sapiens
aacactaactgccaatcctgtggacacgggcattcgagaccttacagctgctcccaccaccccaaccatcaactgaagcagaagaaccaccttatcacccmtagcattatgagaaataataaactgttatataataatcacaaaactgggtaggaagaatcaatattgtgaaaatggccatactgcccatggtaatttata

SEQ ID NO: 9848 - DNA, 201 bp, Homo sapiens
aatggcaatgaaagccaaaattgacaaatgggatctaattaaactaaagagcttctgcacagcaaaagaaactaccatcagagtgaacaggcaacctacarcatgggagaaaatttttgcaatctactcatctgacaaagggctaatatccagaatctacaatgaactcaaacaaatttacaagaaaaaaacaaacaaccc

SEQ ID NO: 9849 - DNA, 201 bp, Homo sapiens
atggcaatgaaagccaaaattgacaaatgggatctaattaaactaaagagcttctgcacagcaaaagaaactaccatcagagtgaacaggcaacctacaamatgggagaaaatttttgcaatctactcatctgacaaagggctaatatccagaatctacaatgaactcaaacaaatttacaagaaaaaaacaaacaacccc

SEQ ID NO: 9850 - DNA, 201 bp, Homo sapiens
ttgcaatctactcatctgacaaagggctaatatccagaatctacaatgaactcaaacaaatttacaagaaaaaaacaaacaaccccatgaaaaagtgggcraaggatatgaacagacacttctcaaaagacatttatgcagctgaaagacacatgaaaaaatgctcatcatcacttgccatcagagaaatgcaaatcaaaa

SEQ ID NO: 9851 - DNA, 201 bp, Homo sapiens
cagctgaaagacacatgaaaaaatgctcatcatcacttgccatcagagaaatgcaaatcaaaaccacaacgagataccatctcacaccagttagaatggcratcattaaaaagtcaggaaacaacaggtgctggagaggatgtggagaaataggaacacttttacactgttggtgggactgtaaactagttcaaccattgt

SEQ ID NO: 9852 - DNA, 201 bp, Homo sapiens
atgctcatcatcacttgccatcagagaaatgcaaatcaaaaccacaacgagataccatctcacaccagttagaatggcaatcattaaaaagtcaggaaacracaggtgctggagaggatgtggagaaataggaacacttttacactgttggtgggactgtaaactagttcaaccattgtggaagtcagtgtggcgattcct

SEQ ID NO: 9853 - DNA, 201 bp, Homo sapiens
aggaaacaacaggtgctggagaggatgtggagaaataggaacacttttacactgttggtgggactgtaaactagttcaaccattgtggaagtcagtgtggygattcctcagggatctagaactagaaataccatttgacccagcaatcccattactgggtatatacccaaagaattataaatcatgctgctataaagacac

SEQ ID NO: 9854 - DNA, 201 bp, Homo sapiens
atatacatatatatgaagatatatatacacacacatatagatacacacacatataaagatacacacacacggcatatatacacataaagatatatatatayacacacatatatagtacatataaatatatgtgcacatacacataaagatatatatacacacatatgtatggacaacacattatctacaaacttacaaagg

SEQ ID NO: 9855 - DNA, 201 bp, Homo sapiens
gatgggaagatggcttgagcccaggagtttgaggctacagtgagctacgattgtagtaccacacactccagcctgggcaacagaggaagaccctgtatttaaaaaaaaaaaaaaaagaatgaccacaccaaatgttggcaaggataagaggcacctaaaactcacaaatacagttgggagaaatgtaacatggtataggca

SEQ ID NO: 9856 - DNA, 201 bp, Homo sapiens
tggagggattaccaaggggcacaaaaacttttagggatgatattggatatgtttattatcctgattatagtgatagtttcacttatatatatgtatgtacrtatgtgtgtgttcaaacttatcaaattgtacacttaaactatgcacagtttaccatccatctcaaagctgtttttatataaagttgcactaatgatccaa

SEQ ID NO: 9857 - DNA, 201 bp, Homo sapiens
acctctattcagccataatcaacttacaaagtatagtgtttcttcaactcatatggttttttgtggaatgggttgtgagtttatgatataatggaatgtatttttttttttttggtcatttgttagggttatctttggcaatttatttcttactgtcagcacttccaatttcagcatgatctgttgtcaggggtacagaga

SEQ ID NO: 9858 - DNA, 201 bp, Homo sapiens
aggaattaacaaacaaattagcaatattaaaaggatagttacactctactaatagtcgtgtgtttctggttaaataaaactaaagctacatgtaggtatgyagaatgctggagtttcccaaaacaatacagaagtgtttttaaaagggggacctgaaacaaaatttcctttcaaatctgaatttagtaccgctaagagtga

SEQ ID NO: 9859 - DNA, 201 bp, Homo sapiens
gagctcaccaatactaggcaaattccaggaggaaggtaataactcccagtaatatattctaaaaacagcctcaaaagccctcaaaaaacaaacaaacaaamaaaaagcaagcactgtattggacaatctgtagaactcttagagcctgacacgtctgtatgcagctctgtggacgtgtgagttagcagccacagggagttc

SEQ ID NO: 9860 - DNA, 201 bp, Homo sapiens
ctccagtttcatcttgttccagcctcacacttgctcactctttttagtcatgctttcttagggttccttaaatacctggagcaagtaggtctgtcacagaygagtgaaccagagcaacgccatcttgaataggagctgggtaaaataaggctgacacctagtgggctgcactcccagacggttaaggcattctaagtcaca

SEQ ID NO: 9861 - DNA, 201 bp, Homo sapiens
agtgacacttagcacaaagttcacatgcacaactgttcaatcacagtttataaaagcacctgaacataacacaaagccaaagcaatcctggacaaatggamtaaagctggagatatcacactacctgacttcaaaatataatacaaatctatagtagccaaatcagcatggcactggcataaaaacagacacatagaccaa

SEQ ID NO: 9862 - DNA, 201 bp, Homo sapiens
gataaataggaattaaccagatatagaagtagagtaaatagagaagtcaagtcattttgttcagaaacaagagcatgacccaaggtatagtggcaagaaakaattcagtacatgtggaaaattaccagatctctgctattgcaggagtagtagaaataagttaggtatgaatcagctcctgggggccttttatagttaata

SEQ ID NO: 9863 - DNA, 201 bp, Homo sapiens
tagtatatattaactcgtttaagcctcatgacaaccctatgaagtgggtcttattatttccattttaaagaagttaaggtacagagggtttaagtgacttsagcaaggtcacagagctggtaaatagtgaagactgcattcaaacctaggcagcctagctctggagtttctgtatcattgattttcaaaaaggcatcataa

SEQ ID NO: 9864 - DNA, 201 bp, Homo sapiens
gcttgaagtgctttgcctgtgttatgaccacacagagaggaggtaacaaagccaagaatctggatccagatctctctgatccatgggcccaaactcttaaycaacacactctacttctataccctatgcctgggcattctcagagcatgttaaatttacataacattatcacaaattaaataacagccaaattaaaacctt

SEQ ID NO: 9865 - DNA, 201 bp, Homo sapiens
taagacaaaaatattatgttcacagtcatatacccctactgaaaataatagagaaagtcacttctaaatattattgcagggagtcctctgcaaaggatatwgtcttgggaaagtcagaactattaaaaagtaaaccagaacccctgtttttttaatggcttcaaatttgttctgtagttaaaagatttaaactagtctcag

SEQ ID NO: 9866 - DNA, 201 bp, Homo sapiens
ataatagagaaagtcacttctaaatattattgcagggagtcctctgcaaaggatattgtcttgggaaagtcagaactattaaaaagtaaaccagaaccccygtttttttaatggcttcaaatttgttctgtagttaaaagatttaaactagtctcaggacacaagtgaggcaatttctagccagaggcaacaaagctccta

SEQ ID NO: 9867 - DNA, 201 bp, Homo sapiens
cttggtttcattcagagcacacttggctgtgctaagcacacattagccatggatttctctcagggttctttctgttgttttcattcacaagttaaatggawgaaatgaggtttttttccagccttcctaagggcctcaaagtcatatccagcagacttgcagggttctcaggtgaaagcaaattggagaaatttttaaaat

SEQ ID NO: 9868 - DNA, 201 bp, Homo sapiens
gagaaatttttaaaatgtaattttggtttttactccaactactttcaacatggatttgtaaaagactgctaggatcattaaaatcagcattgaagctatgytgagcaagatggatagctgcactagaaaagctgtaacaagagtcattgtgaatgaaaggaaaattttgctctagatttgttggtagccaaggcacaaaaa

SEQ ID NO: 9869 - DNA, 201 bp, Homo sapiens
taaaattcatacttcaggagagaagtttcatgcacagatggacctttatctacctggggtgtgggttgtagctaaaccaggaaagtcaatcagatttccaraagatggcatgggcgcatgatgggttgtgaaggatagcatcaaggaggatgattagcagtgttaaatgaaagagaaaggtcaagtaaggtaaggcctaaa

SEQ ID NO: 9870 - DNA, 201 bp, Homo sapiens
cttccagctttcagaaggtacaggctactgatggaatgatacagagattcttcttccccctaaagacattgccccttataagggctacccagcaaaccccratctgagagtaaaaaaaggaagcctcctaggcaggtccttaccatttcataccgctaatgaactatgagcattcggtgttactggtctctcaaaatcttg

SEQ ID NO: 9871 - DNA, 201 bp, Homo sapiens
acatggatggggaggcctcaggaaacttacaatcatggcagaaggcaaaagaggcaattcttacatggaggcaggcaagagagcaagccagagcagggaaractgccttataaaaccatcagatctcctgagaacttattcactatcatgagaacagcatggggaaaatgcccccatgatccaatcacctccctcccttga

SEQ ID NO: 9872 - DNA, 201 bp, Homo sapiens
ccctcctggctgctctcacaggctggcaatgagtgtctgcgggttttccaggcacagtgcaaactgtgggtggacctaccattgtggaatctggaggaccrtggccctcttctcacagctccactaggcagtggcagtggggactctgtgtgggagctccaaccccacatttcccttctgtactgccctagcagaggttct

SEQ ID NO: 9873 - DNA, 201 bp, Homo sapiens
agactggggaatttatacagaaaagaggtttaatttgctcacagttccacatggctggggaggcctcaggaaacttacaatcatggcagaaggtgaagcasgtacatcttacatggtgacaagtgagacagagagcaagagcaagaaatactgccttatgaaaccatcagttctcatgagaactcactcactatcatgaga

SEQ ID NO: 9874 - DNA, 201 bp, Homo sapiens
tcttacatggtgacaagtgagacagagagcaagagcaagaaatactgccttatgaaaccatcagttctcatgagaactcactcactatcatgagaacagcrtggaggaaatcccatgatccaatcccctcctgcctggcccctcccttgacacgtggggattacaattcaggatgagatttgggtgggcacacagggccaa

SEQ ID NO: 9875 - DNA, 201 bp, Homo sapiens
cttgcgtattattttaaagtttggtgctccttaacgttcccatccacgtgtactccagatcatgaaaacaataaaaatactaaataagcccacgtctttcaaaaaaaaaaaaaaacctgatttttcactatatcaccttagattaaaatagtaagttctcactttgctcaggtactgtggtaagaatcaacattatctcac

SEQ ID NO: 9876 - DNA, 201 bp, Homo sapiens
acatggctaccttttgaactcaagctgttaaagatcctttcttgtgttcaaaagttttactgattttgaaaggtcttattgataaaaacacagagaaactygggggaaaaggacaaagagaaaaaagaagaaagggaagaataaagaagccagaaaataaagacaaggaagagagcccaagaggagcagaaagaggcaata

SEQ ID NO: 9877 - DNA, 201 bp, Homo sapiens
gcacgctgagaattatggacatttccatggaggcatttttgtgttactgattaaaaattgcagagcttttctacagaaaaggagacacaggaacatataaggatctagaaacaaaactttcttcacattgttcagaaaacatttgattcttgagtccataaagccatgcattgaaaactccatcaaaacctgtttccttag

SEQ ID NO: 9878 - DNA, 201 bp, Homo sapiens
agggattcaacatcttcctagtttagtcttgggagggagtatctgtccaggaatttatccatttcttctagattttctagtttatttacatagaggtgttyatagtattctctgaaggtagtttgtatttctgtgggatcgatggtgatatcccctttatcatttttattgcatctatttgattctcctctcttttcttct

SEQ ID NO: 9879 - DNA, 201 bp, Homo sapiens
aggagcaggttgttcagtttccatgtagttgtgcggttttgagtgagtttcttaatcctgagttctaatttgattgcactgtggtctgagagacagtttgytgtgatttctgttcttttacatttgctgaggagtgttttacttccaacaatgtggtcaattttggaataagtgtgatgtggtgctgagaagaagatatat

SEQ ID NO: 9880 - DNA, 201 bp, Homo sapiens
atgtggtcaattttggaataagtgtgatgtggtgctgagaagaagatatattctgttgatttgtggtggagagttctgtagatgtctattaggtcggcttrgtgcattgctgagttcaagtcctggatatccttattaatcttctgtctcgttcatctgtctaatattgacaatggggtgttaaagtttcccattattatt

SEQ ID NO: 9881 - DNA, 201 bp, Homo sapiens
gtcaggaaacaagtgctggagagtatgtggagaaataggaacacttttacactgttggtggaactgtaaactacttcaaccattgtggaagacagtgtggyaattcctcaaggatctagaactagaaataccatttgacccagcaatcccactactgggtatatacccaaaggattataaatcatgctactataaagacac

SEQ ID NO: 9882 - DNA, 201 bp, Homo sapiens
tcaggaaacaagtgctggagagtatgtggagaaataggaacacttttacactgttggtggaactgtaaactacttcaaccattgtggaagacagtgtggcrattcctcaaggatctagaactagaaataccatttgacccagcaatcccactactgggtatatacccaaaggattataaatcatgctactataaagacaca

SEQ ID NO: 9883 - DNA, 201 bp, Homo sapiens
aggtgaaaggatcacttgagcccaggatgttgaggctgcagtgagctgtgatcatgccactgcactccagcctgggcaacagagtgagacactgtctcaaaaataaataaataaataaataaataaataaataaataaataaataaataaaagttccatctgttaatattgctaaaaaaaaaaaaaaaggagtttgagacc

SEQ ID NO: 9884 - DNA, 201 bp, Homo sapiens
ggtgaaaggatcacttgagcccaggatgttgaggctgcagtgagctgtgatcatgccactgcactccagcctgggcaacagagtgagacactgtctcaaaaataaataaataaataaataaataaataaataaataaataaataaataaaagttccatctgttaatattgctaaaaaaaaaaaaaaaggagtttgagacca

SEQ ID NO: 9885 - DNA, 201 bp, Homo sapiens
gtgaaaggatcacttgagcccaggatgttgaggctgcagtgagctgtgatcatgccactgcactccagcctgggcaacagagtgagacactgtctcaaaaataaataaataaataaataaataaataaataaataaataaataaataaaagttccatctgttaatattgctaaaaaaaaaaaaaaaggagtttgagaccag

SEQ ID NO: 9886 - DNA, 201 bp, Homo sapiens
tgaaaggatcacttgagcccaggatgttgaggctgcagtgagctgtgatcatgccactgcactccagcctgggcaacagagtgagacactgtctcaaaaataaataaataaataaataaataaataaataaataaataaataaataaaagttccatctgttaatattgctaaaaaaaaaaaaaaaggagtttgagaccagc

SEQ ID NO: 9887 - DNA, 201 bp, Homo sapiens
gggcaacagagtgagacactgtctcaaaaataaataaataaataaataaataaataaataaataaataaataaataaaagttccatctgttaatattgctaaaaaaaaaaaaaaaggagtttgagaccagcctgaccaacatggagaaaccccgtgtctactaaaaatacaaaattagccaggtgtggtggcgcatgccta

SEQ ID NO: 9888 - DNA, 201 bp, Homo sapiens
aatggaattgatgaccttgaagggttgttttctgagtataagaggacacgcctgggcctgcagagctttccaagccatggcatgaggtgaggttctatgaygaagagcagcaccgaggcgctgtttcatcctttaagataccttgggcttctttttaaagagtgatgaaacaaactagataccctcgaatctggaaaagta

SEQ ID NO: 9889 - DNA, 201 bp, Homo sapiens
tttgtacgcttactaagtagttctaatcattgcattcatagtgacctttcccactggagaattcctgttcattcttgaggacccagctcaaatgttatctyctctgagaagcctttcttaattctctcaggcaggatttttagcttaccccttagtgttcctgcagtcctttttgtttggctccactatagacttcgtcat

SEQ ID NO: 9890 - DNA, 201 bp, Homo sapiens
gccctacagaaaaaatcttcatgaggacagtcatatgtatacgtatacgtatatgtatatgtatatgtatatgtatatgtatatgtatatgtatatgtatatgtgtaaaaccgtgtccccaaatcagctctacaaagggaaaggcttaacacacactacttataaacttgcatgagtctaatgccacaagcaaaaagactg

SEQ ID NO: 9891 - DNA, 201 bp, Homo sapiens
acaaagtggccgggaagctcgacctgggtggagcccacctcagctcaacaagcctgtctgcctctgtagactccacctctgggggcagggcatagctgaayaaaaggcagcagaaacgtttgcagactaaaatgtccctgtctggcagctctgaagagagcagtggttctcccggcatggtgtttgagctctgagaatgga

SEQ ID NO: 9892 - DNA, 201 bp, Homo sapiens
gctctgagaatggacagactgcctcctcaagtgggtccctgacccccatgtagcctaactgggagacatctcctagtaggggctgactgatacctcatacwgccagatgcccctctgagatgaagcctacagaggaaggatcaggcatcaatatttgctgttctacaaaatttgctgttctgcagcctctgctggtgatac

SEQ ID NO: 9893 - DNA, 201 bp, Homo sapiens
agggaaaactaacaaacagaaaggaatagcatcaacatcaacaaaaaggacatccacaccaaaaccccatttgtaggtcaccatcatcaaagaccaaaggkagataaaaaccacaaagatgaggagacaccagagcagtaaagctgaaaattctaaaaaccagagggcctcttctcctccaaaggatcgcagctcctcgcc

SEQ ID NO: 9894 - DNA, 201 bp, Homo sapiens
atcaacatcaacaaaaaggacatccacaccaaaaccccatttgtaggtcaccatcatcaaagaccaaaggtagataaaaaccacaaagatgaggagacacyagagcagtaaagctgaaaattctaaaaaccagagggcctcttctcctccaaaggatcgcagctcctcgccagcaatggaacaaagctggatggagaatga

SEQ ID NO: 9895 - DNA, 201 bp, Homo sapiens
tcttcaaggagaactacaaaccactgctcaacgaaataaaagaagacacaaacaaatggaagaacattccatgctcatggataggaagaatcaatatcgtraaaatggccatactgcccaaggtaatttatagattcaatgccatccccatccagctaccaatgactttcttcacagaattagaaaaaactactttaaagt

SEQ ID NO: 9896 - DNA, 201 bp, Homo sapiens
tcgaatttcaccatctccctgaggtcgtccaaaaagcaaaactggttggttctaaaatataaaatgcacatgtcagagtttttcataatcacatgaaaatraaaacaaatattagtagagatatttactcaagacaactaccttattacattaaaatgttaccattttttatacttttaaagcatacttactctaaaaagc

SEQ ID NO: 9897 - DNA, 201 bp, Homo sapiens
cgtccaaaaagcaaaactggttggttctaaaatataaaatgcacatgtcagagtttttcataatcacatgaaaataaaaacaaatattagtagagatattwactcaagacaactaccttattacattaaaatgttaccattttttatacttttaaagcatacttactctaaaaagctcaggtctacatgacaaataagtct

SEQ ID NO: 9898 - DNA, 201 bp, Homo sapiens
tcaattgattttaattagtatatattcttaaaggggaaattagctatgaaaagaaagactcaaccggaagggtccaaattacgagacggttcggcaattartattttttgagcatctactacgtgccaaccaccataacaggtgtacggcaaaatgatacagacactgccctcatgaagcacactgcccagtggaggaaca

SEQ ID NO: 9899 - DNA, 201 bp, Homo sapiens
gggcgggggggcgcgcgctaatttggtctataaagtccaggctggctttcttgagctaggacctcaaggacgaaaagctctgagttaattatttaaaatartgagctattttcccagaggctgataactaaattatttttaagtgtttatgaacacttactgtacacgctagaggaaaaaagaattgactgaaaatcacta

SEQ ID NO: 9900 - DNA, 201 bp, Homo sapiens
tctaaaattcttatggaatctcaagggattctgaatagtcaaaacaatcttgaaaaggaacaaagctggaagtctcatacttactgacttgtttccaaaayttattgcaaagccacaataatcaaaatcatgcggcactggcatacaaacaggtatatagaccaacagaatagtagagagcccagaaataagtcctcacat

SEQ ID NO: 9901 - DNA, 201 bp, Homo sapiens
aaaaatgtttcaaatacccaaacataacagttaaaactataaaacttttacaagaaaatggggaaaaactttatgacaatagattcagcaattatttcttygagattgataaatgggactttgtcaaaattaaaaacttttgtgcctcacagacaatatcaacagagtgaaaagccaacagacacaagaaaagtatttgca

SEQ ID NO: 9902 - DNA, 201 bp, Homo sapiens
ctacaacacaaagacaaaaaacaacttgattcaaaaatgggcaaagcatttgaataggcatttttccaaagagaatatacaaatggccagcaaacacacaragacaatattcaacatcattagtcattaagaaaatgcaaatcaaacccacgatgagatattgctttaaaaccattaagatggctgttacccaaacaaacc

SEQ ID NO: 9903 - DNA, 201 bp, Homo sapiens
atatttatagcattaatgtgtgtgtgtatgtatgtgtgtgtgtatatatatacacacatatatatacacacatatatatatatacgtatatatatatatayacacacacacacacacacttttttttttgagacagagtcagagtctcgctctgttgcctaggctgcagtgcagtggcatgatctcggttcactgcagcct

SEQ ID NO: 9904 - DNA, 201 bp, Homo sapiens
atttatagcattaatgtgtgtgtgtatgtatgtgtgtgtgtatatatatacacacatatatatacacacatatatatatatacgtatatatatatatacayacacacacacacacacttttttttttgagacagagtcagagtctcgctctgttgcctaggctgcagtgcagtggcatgatctcggttcactgcagcctcc

SEQ ID NO: 9905 - DNA, 201 bp, Homo sapiens
ttatagcattaatgtgtgtgtgtatgtatgtgtgtgtgtatatatatacacacatatatatacacacatatatatatatacgtatatatatatatacacayacacacacacacacttttttttttgagacagagtcagagtctcgctctgttgcctaggctgcagtgcagtggcatgatctcggttcactgcagcctccgc

SEQ ID NO: 9906 - DNA, 201 bp, Homo sapiens
atagcattaatgtgtgtgtgtatgtatgtgtgtgtgtatatatatacacacatatatatacacacatatatatatatacgtatatatatatatacacacayacacacacacacttttttttttgagacagagtcagagtctcgctctgttgcctaggctgcagtgcagtggcatgatctcggttcactgcagcctccgcct

SEQ ID NO: 9907 - DNA, 201 bp, Homo sapiens
ataggcatgtcataatattttatttatgtgtatatatatatgtttgtgtatatatatgtgtgtatatgtgtgtgtgtgtgtgtgtgtgtgtgtgtgtgtgwatgcaatttgaattccattgtctttaggcaagaataaaaaatacaaacaaattactgatgaatctgccctaccttcatggcatcaagagccagtttcaga

SEQ ID NO: 9908 - DNA, 201 bp, Homo sapiens
cagaatctattaagtataataaatccataaaaattctattcttttattccttaaaagttacttttacttcattaaataaaagtcatgttattaaagttccmaatcacccactataaaatattctcactttgtgaatctgtggtttcaaatcatcaagcatttcaagtgatttcgccactaaagtatagtagtaagtaaaaa

SEQ ID NO: 9909 - DNA, 201 bp, Homo sapiens
atcacttccctgtaaatccccttaccttctcttcttccattgtgcttttctagaaaaacaaacaccctgatcaagtctaacttgccacatattttgtgactctatctaagaagttaagcatggacattaccgatcgtctaattttcaatatgaccacaaaactcaactgggcctgtaacgctacatagtgctactacagtt

SEQ ID NO: 9910 - DNA, 201 bp, Homo sapiens
tcacttccctgtaaatccccttaccttctcttcttccattgtgcttttctagaaaaacaaacaccctgatcaagtctaacttgccacatattttgtgactctatctaagaagttaagcatggacattaccgatcgtctaattttcaatatgaccacaaaactcaactgggcctgtaacgctacatagtgctactacagttc

SEQ ID NO: 9911 - DNA, 201 bp, Homo sapiens
acttccctgtaaatccccttaccttctcttcttccattgtgcttttctagaaaaacaaacaccctgatcaagtctaacttgccacatattttgtgactctatctaagaagttaagcatggacattaccgatcgtctaattttcaatatgaccacaaaactcaactgggcctgtaacgctacatagtgctactacagttccc

SEQ ID NO: 9912 - DNA, 201 bp, Homo sapiens
agagtataatttcatgattccctaaaattctattctactaccaccctgccattatttaactgggtggcacttcatttctctctcagactttgtttccttaytagcgaaatgaaaagactagacaaaagattccctatggttgttttgaactctgaaaggtcatgcatatgtctccaaatgcagtaacaagtcataattata

SEQ ID NO: 9913 - DNA, 201 bp, Homo sapiens
aatggggaagctataaaaatttataggtgtaagtcaccactggtatgggttaaaaaagaatatcgactgggcacagtggttcacacctgtagtcccagcamgttgggacaccaaggcaggtggatcatgaggtcaggagttcgagaccatcctggctaccacagtgaaaccctgtctctactaaaaataaaaaattaactg

SEQ ID NO: 9914 - DNA, 201 bp, Homo sapiens
gtaatcccagcactttgggaggctgaggcgggcagatcacgagatcaggagatcgagaccatcctggccaacacagtgaaaccctatctctactaaaaatmcaaaaaaaaaaaaaaaaaattagccaggcatggtggcgggcacctgtagtcccagctacttgggaggctgaggcaggagaatggtgtgaacctgggaggt

SEQ ID NO: 9915 - DNA, 201 bp, Homo sapiens
tcaaaggatgtagataagtagctcagccctaatgggcaaaatgaccccagtgagtgtggggtgtgccactgatgcactaggttgggaagagtattcagcawtgttctctgacggtttttcattgttatttcatttcagcttaacctcagatgaagtattgcacctagaagaatggatatagtttacttgacaaaaagagag

SEQ ID NO: 9916 - DNA, 201 bp, Homo sapiens
gccatgaagagattaacacaagaccatagtttcaaagtttatttacttttagccttctgctttcccctaaatattaatctagataatatcttgactttaaraaaataaagagtaactaataatacatacaggtttatcagatgtagtcttgtggaatgaacacaaaccaacaagggaaaattctaacgaggctgaattcat

SEQ ID NO: 9917 - DNA, 201 bp, Homo sapiens
ttcaagatggtctcttggccttcccccactctgtacaaaggacgatgcctgtgtaaaaataggaggggtgttctcacacctgaccactgctcaaggtggcycctgctcccacacaccccttcccaattcccaggcaggtggctgtttgtgcctccaataagcaggatgttcaagaagaacatgcaccgaggccaggcgtgg

SEQ ID NO: 9918 - DNA, 201 bp, Homo sapiens
cgatgcctgtgtaaaaataggaggggtgttctcacacctgaccactgctcaaggtggctcctgctcccacacaccccttcccaattcccaggcaggtggctgtttgtgcctccaataagcaggatgttcaagaagaacatgcaccgaggccaggcgtggtggctcatgcctgtaatcctagcactttgggaggctgaggtg

SEQ ID NO: 9919 - DNA, 201 bp, Homo sapiens
gatgcctgtgtaaaaataggaggggtgttctcacacctgaccactgctcaaggtggctcctgctcccacacaccccttcccaattcccaggcaggtggctgtttgtgcctccaataagcaggatgttcaagaagaacatgcaccgaggccaggcgtggtggctcatgcctgtaatcctagcactttgggaggctgaggtgg

SEQ ID NO: 9920 - DNA, 201 bp, Homo sapiens
atgcctgtgtaaaaataggaggggtgttctcacacctgaccactgctcaaggtggctcctgctcccacacaccccttcccaattcccaggcaggtggctgtttgtgcctccaataagcaggatgttcaagaagaacatgcaccgaggccaggcgtggtggctcatgcctgtaatcctagcactttgggaggctgaggtggg

SEQ ID NO: 9921 - DNA, 201 bp, Homo sapiens
tgcctgtgtaaaaataggaggggtgttctcacacctgaccactgctcaaggtggctcctgctcccacacaccccttcccaattcccaggcaggtggctgtttgtgcctccaataagcaggatgttcaagaagaacatgcaccgaggccaggcgtggtggctcatgcctgtaatcctagcactttgggaggctgaggtgggc

SEQ ID NO: 9922 - DNA, 201 bp, Homo sapiens
cccaggaggcggaggttgcagtgagccgagatcacgccactgcactccagcctgggcaacatagcaagactccctctcaaaaaaaaaaaaaaaaaaaaaamaaagaagaacatgcaccgaactgtcaacaatggtgactatctaggaggtgaaactgctatgaaattgcgcttttctattgattttttaacatttctatac

SEQ ID NO: 9923 - DNA, 201 bp, Homo sapiens
caatatatttatttccactattttggatatatagtcagtaatataagtgctaggttatataataattcaatatttaattttttgaggaatctccaaacagttttctatattagttttaccatttacattcccaccaacagtatatgagggttccattttctccatatcctcaccagcatccattattccctgcccttgtta

SEQ ID NO: 9924 - DNA, 201 bp, Homo sapiens
tgaggacttttgtatctgtgtttatcagtgatattggcctgtagtctactttctgttgtgtgcttgtctggttttggtattagggtgatgttagctttgtrgaataagtttgaaagtatttcttcctcttcagttttttttttttttgaagagttagagttgaattggtatcagttctttaaatgtttggtagaatttagc

SEQ ID NO: 9925 - DNA, 201 bp, Homo sapiens
tggtagaatttagcagtgaagccatcaggtcctgggcttttctttaatgagagactttttattacggcttcaatcttgttgctccttattggtttgctgargttttctatttcttcgtggcttaatcttgtcaggttgtatgtgtccaggcatttatctgtttcttctagttttcccaatttgttggcctatacttataat

SEQ ID NO: 9926 - DNA, 201 bp, Homo sapiens
ctggcaaagattatctctctttcatatgtgaaggatagcgttgttgaaacaatactcttggatggcagcaggggtggggtgggggttgggttttttttttkattcccctggcagcactttgaaaatgtatgttttctgttgagaagtctgttgccagaccaactggagttcctttatatgttatttgcttcttttctcttt

SEQ ID NO: 9927 - DNA, 201 bp, Homo sapiens
attaagtctcaaaacaaagatattttatacaatgtcctgggaagctttgctgacatatttctcaaggttttaacactaacatttccatctttagtagaaayacgggatacatatgggctaagaaatgctaatgcttagaaactgctcatgaacatgggctattattgaacacagaaatgacaaatatgaatgaagtgaaca

SEQ ID NO: 9928 - DNA, 201 bp, Homo sapiens
aaccaccacctcaaacatttataatttctatgtgttggaacatttcaagtcctctcttctagctattttgaaaaatgtaatgcattattaactatactcaytctactttgctattgaacattagaacttactccttctatctaactgtatgcttgtgcccattaaccaacctctcttcaacccccaccccctatacaccat

SEQ ID NO: 9929 - DNA, 201 bp, Homo sapiens
tgtgcctgagttattgcacttaacataatgatctccagaaccaaccatgttgttgtaaatgacaggattttattcttttgtatggctaaatagtactccagtgtgtgtgtgtgtgtgtgtgtgtgtgtgtgtgtgtgtgtgtgtgtgtatacacaccatgttttctttacccatttatctgttgacaggtaaacatttagg

SEQ ID NO: 9930 - DNA, 201 bp, Homo sapiens
gtgcctgagttattgcacttaacataatgatctccagaaccaaccatgttgttgtaaatgacaggattttattcttttgtatggctaaatagtactccagtgtgtgtgtgtgtgtgtgtgtgtgtgtgtgtgtgtgtgtgtgtgtgtatacacaccatgttttctttacccatttatctgttgacaggtaaacatttaggt

SEQ ID NO: 9931 - DNA, 201 bp, Homo sapiens
catattcatcagtttcaaggttaagatatggacatcttagggaggccattatcctgtctacaaatgatcaatcttgaaaacatcaacttacctctgtgataacacctgcaaaatgagaagtctgaactacatcatttgcaaagcccctttcagccctattttatgcaggtgagtaaatgtcaagaattctaacaagaagct

SEQ ID NO: 9932 - DNA, 201 bp, Homo sapiens
gtctgagaaccagaaaacaggttctagaaactatgagtttctcatgcacataagatcatgcactatttagtgaataagacataattacacacttttttttwttttgagacaaagtcttgctctatcacccagggtggagggcagtgatgcaatcatagcccactacagcctccagttcctggcctcaagagatcctcgtgc

SEQ ID NO: 9933 - DNA, 201 bp, Homo sapiens
ctttctttacctacgattgtcttggtaaattctttaccatctgcaatgctggccccaggcaatcacagggtgacaactatgttaccaggctggccttgaamtcctggcttcaagcaatcctcctaccttgggaggatcccaaagtactgggattacaagtgtgagccaccgcagctggcttataaaaattaagtttaattt

SEQ ID NO: 9934 - DNA, 201 bp, Homo sapiens
atatatacacctaacactggagcatccagattcataaaacaagtttttagagacccacgaaaagacaggcacaaaataatagtgaaagatgtcaacactcmactgacagcattagacagatcatcgaggcagaaacctaacaaagaaattatggacttaaacttaacacttgacaaattggacctaatagacattgacaga

SEQ ID NO: 9935 - DNA, 201 bp, Homo sapiens
tcttcctgatgtacaaagaaaaactggtaccagtcctgctgaagctgttcccaaaaaatcaaagaggaaggactcctccctaactgactctacaaagccarcatcatcctaataccaaaacctggcagagaaacaatgggcaaaaaaaaacaaaacgaaacaaaacttcaagctgatatccctgatgaatatagatgcaga

SEQ ID NO: 9936 - DNA, 201 bp, Homo sapiens
aatcaaagaggaaggactcctccctaactgactctacaaagccagcatcatcctaataccaaaacctggcagagaaacaatgggcaaaaaaaaacaaaacraaacaaaacttcaagctgatatccctgatgaatatagatgcagaaatccttaacaaaatactagcaaaccaactctagaagcacatcaaaaagttagttt

SEQ ID NO: 9937 - DNA, 201 bp, Homo sapiens
tggaaccaaaaaagagcccaaatagccaaagcaatcttaagcaaaaggaacaaagccaaaggcatcacattacccaacttgaaactacactacaaggctayagtaaccaaaacagcatggtactgatacaaaaagtgacacatagaccaatgaaacagaatacagaaccaataaataaagctgcacacctacaactatctg

SEQ ID NO: 9938 - DNA, 201 bp, Homo sapiens
gtactggcattactggctagccatacacaggagaatggaactggactcctacctatcaccatatacaaaaatcaactcgagatggattgaagacttaaatstaagacctcaaactgtaaaaatcctagaagaaaacctaggaaatactcttctcaacatgggacctggcaaataattcatggtcaagttctcaaaagcaat

SEQ ID NO: 9939 - DNA, 201 bp, Homo sapiens
tttctatcacaactctaaatgttcactaatcatctatagacttttgtcttagaattacactgttgagattaaaaatgtatgtgtgcgtgtgtgtgtgtgtrtatatatatatttatatatatatatatgaggaaggtggttcaattcactagccatctgctgaagtatgagcaggcgtatttaaacctccacattaccgag

SEQ ID NO: 9940 - DNA, 201 bp, Homo sapiens
ttaggcaggagaatggcgtgaaccctggaggcggagcttgcagtgagccaagatcatgccactgcactccaacctgggcaacagagcaagactccgtctcaaaaaaaaaaaaaaaaaaatagtggcaaactgaatccagcagcacatgaaaaagcttgtccatcacgatcaagtcagtttcatccctgggatgcaaggctg

SEQ ID NO: 9941 - DNA, 201 bp, Homo sapiens
aacccacagccaatatcatactgaatgggcaaaacctggaagcattccctttgaaaatcagcacaagacaaggatgccctctctcaccactcctattcaamgcaatattggaagtcctggacagggcaatcaggaaagataaagaaataaagggcattcaaataggaagagaggaagtcaaattgtctctgtttgcagatg

SEQ ID NO: 9942 - DNA, 201 bp, Homo sapiens
acccacttagaaaaatttgtgatcgattcagtatagcgccttgtttatatttgagaaaatacagtaactgatgctattttacgagtttgctgatttttttwaaaaagtttttcaagagtttcaggttttactagatacaataaaatggaaacataattctcaatttcaagtacaatacagtgagattgcttttaatctgta

SEQ ID NO: 9943 - DNA, 201 bp, Homo sapiens
agctggctgtggtggcatgcacctgtagtcccagctactcgggaggctgaggtggaaggattgcttcagtcagagagaaggaggttgcagtgagccaagaytgcaccactgcactccagcctaggcatggagggtgaaaccctgtctcaaaaaataataaataaataagtaaatgtgtgagtactagcatccccttctcac

SEQ ID NO: 9944 - DNA, 201 bp, Homo sapiens
tatgggagtaggaaagtgagaaataaggttagaaaggtaggcagaggcctgatcatgaagaatcttgtgcggcttgtaaaagagtttagatgttattctcttataaacaacagggatccactatcaagttttaaacctgttacagctagttagataggcaagagtggacaggaaagggttctcccagccactaggactgtc

SEQ ID NO: 9945 - DNA, 201 bp, Homo sapiens
gtgaaggtttggcaattatcacactgcctctctaaaagtgataacttggcagctgatgcaagggaaaagccacttcctgatggtccacacctgttgcactraagtgttaactgaatgcaggcaccagagataagcaatttcctgggagtacacagtaagagacaaaatggcagagtatgagtttccaggggcactccacca

SEQ ID NO: 9946 - DNA, 201 bp, Homo sapiens
tgaggcaggagaatcacttgaacctggaaggtggaggctgcattgagccgagattgtgtcactgtactccagcctgggcaaaagagcgagactccatctcmaaaaaaaaaaaaaaaaaaaaaaaaatagggcatttgtaaccatttagctcctggcagggtgaacaaaacaagaaacattaccaaaatagaaatgtctcca

SEQ ID NO: 9947 - DNA, 201 bp, Homo sapiens
ggaatccaaaccaagatctaactcagaaaccatgtattgttttgtttttcaattttttatttacataggttctgtgggaacaggtggtatttggttacatragtaagttatttagtggtgatctgagattttggtgcacccatcacccgagcagtatacactaaacccaatttgcagtcttttatccctcacctccttttc

SEQ ID NO: 9948 - DNA, 201 bp, Homo sapiens
tttgtttttcaattttttatttacataggttctgtgggaacaggtggtatttggttacatgagtaagttatttagtggtgatctgagattttggtgcaccmatcacccgagcagtatacactaaacccaatttgcagtcttttatccctcacctccttttcacactttcccctgagtcccaagtccactgtatcattctta

SEQ ID NO: 9949 - DNA, 201 bp, Homo sapiens
ttatttacataggttctgtgggaacaggtggtatttggttacatgagtaagttatttagtggtgatctgagattttggtgcacccatcacccgagcagtayacactaaacccaatttgcagtcttttatccctcacctccttttcacactttcccctgagtcccaagtccactgtatcattcttattcatttgcatcctca

SEQ ID NO: 9950 - DNA, 201 bp, Homo sapiens
taacaaccctgaagagtgagagtcatatctaacctgaaggcctctgctgactcttaaatgagttcaagttactaaactcactcctctttcctgtgtgattaaaaaaaaaagtgtagaaagcgtttcaaactgttctaatttttgttgatgttggtggagtttgaagtgaattactactgaggaaagagctcaattctaaga

SEQ ID NO: 9951 - DNA, 201 bp, Homo sapiens
taaaaaaacaaaagttaaaatttgctttcagtgtctaaaagactcagatccacctaagcaaaatacacacataccctaactgcagtggcacatattttttwaaaaatatacatgtgaaaactttaaatagatgcattttattatatgtaagttataccaaaataaagtttaaaaaaatggaaaaaaacctactaaccatca

SEQ ID NO: 9952 - DNA, 201 bp, Homo sapiens
gaagaggggagctgggatgtccatggcatgccaaagagatcttggctttgtcctagaagtgatgaggttaaaaggtcttaattagaaaactggaggccagrtgcggtggctcatgtctgtaatcccaacacttcaggaggccgaggtgggcagatcacctgaggtcaggagctcgagaccagcctggccaacatggcaaaa

SEQ ID NO: 9953 - DNA, 201 bp, Homo sapiens
cctgtaccaaaatagctcatgtaccccataaatatatacacctactatgtacccccaaaattaaaaataaattatttattattattattattattattatyattattattattattattattttgagacagggtctttcttgctctgtcacccaggctggagtgcagtggtgcaatctcagttcactgcagcctcaatctg

SEQ ID NO: 9954 - DNA, 201 bp, Homo sapiens
ctgtaccaaaatagctcatgtaccccataaatatatacacctactatgtacccccaaaattaaaaataaattatttattattattattattattattatcattattattattattattattttgagacagggtctttcttgctctgtcacccaggctggagtgcagtggtgcaatctcagttcactgcagcctcaatctga

SEQ ID NO: 9955 - DNA, 201 bp, Homo sapiens
tgtaccaaaatagctcatgtaccccataaatatatacacctactatgtacccccaaaattaaaaataaattatttattattattattattattattatcattattattattattattattttgagacagggtctttcttgctctgtcacccaggctggagtgcagtggtgcaatctcagttcactgcagcctcaatctgat

SEQ ID NO: 9956 - DNA, 201 bp, Homo sapiens
gtaccaaaatagctcatgtaccccataaatatatacacctactatgtacccccaaaattaaaaataaattatttattattattattattattattatcatyattattattattattattttgagacagggtctttcttgctctgtcacccaggctggagtgcagtggtgcaatctcagttcactgcagcctcaatctgatc

SEQ ID NO: 9957 - DNA, 201 bp, Homo sapiens
cttaatgactacagtaaattatctccttatggcccacaattcttgatggcagagccaggatttgcatccaggacttttgttccaagttctcctgtgtagaktgtgtgtgtgtgtgtgtgtgtgtgtgtgtgtgtgtgtgtgtcacttgccatgtagcaggctattttcagggcatataacaatgcccaaaaacctccaaat

SEQ ID NO: 9958 - DNA, 201 bp, Homo sapiens
aacagaatttctgtacaaagaccactggcctggtttccacagatggtcctggttcaagccctgatgtcctaccacaattattgctagtgtccctttctttaaaaaaaaaaaaaaatctgatttggacaataaattgcatagtcattcatctttttcctctacctggagtattcctcattcttcacgccattacatttctgt

SEQ ID NO: 9959 - DNA, 201 bp, Homo sapiens
acctggcctccagctcatgactaatacaaaagatcttctagatgattctggaaacagctaaaagaggtcaactaaaatcagagaatgaaagaattaaaaawtagagtaaaaaacttggtcaagttgctaaagctccagtgtcaacttacaaaaataataatcctcagtgagatgttcctacagccagttattctgtcacga

SEQ ID NO: 9960 - DNA, 201 bp, Homo sapiens
ctggcctccagctcatgactaatacaaaagatcttctagatgattctggaaacagctaaaagaggtcaactaaaatcagagaatgaaagaattaaaaaatmgagtaaaaaacttggtcaagttgctaaagctccagtgtcaacttacaaaaataataatcctcagtgagatgttcctacagccagttattctgtcacgaac

SEQ ID NO: 9961 - DNA, 201 bp, Homo sapiens
agtgtttacttaaaagtaatctacttttacaagcctgtgtgtttgtattagcccattttcatgctgctgataaagaaatacctgagactgggtaatttatrcaggaagaagagtttaatggacttacagttccaagtggctggggaggcctcataatcatggcggaaggtgaggaagagcaagtcatgtcttacatggatg

SEQ ID NO: 9962 - DNA, 201 bp, Homo sapiens
tggcggaaggtgaggaagagcaagtcatgtcttacatggatggcagcaggcaaaaaaagcttccggagggaaactctcctttataaaaccatcagatctcrtgagacttattcactcacatgagaacagcacaggaaagacctgccctcatgattcaattacctcccaccaggtcactcccacaacatgtgggaattcaag

SEQ ID NO: 9963 - DNA, 201 bp, Homo sapiens
aatcgcaacccaagcctcatgtactaagatcaagatcagcagaggttggaggtgtgtgattctatatggttgttgtaattttatatttaaaaagactggcaattttgttattaatcagggatataatctgtattaaaaaaatggctacaggaatgtcatgttccgttccatttataccacttttcagacttaaactgtttt

SEQ ID NO: 9964 - DNA, 201 bp, Homo sapiens
ctataaatgatcttctgaaatagctatcctcaccaggacatggagaagatatgctcagttaaccgaggttattgcatcacaatagggactttgtggtctckgaacttaacagacatatcttatacaaaactatttgtggtagtggtggtagtggtgcataattttcaattatacaagaaaatagtgtccacaagttatttt

SEQ ID NO: 9965 - DNA, 201 bp, Homo sapiens
gtgccatgatgtagtaatgacacagaacagccaggcagggactacatgacttggaagtttaaaagaaagtaaataccaagtgttttttgtttgtttgtttktgtgtgtgtgtgcgtgtttacgttagtttcctatgaagaatgaaagctttgtgaaatttgtagcacatacagaaaacacacctatgactatcattttcta

SEQ ID NO: 9966 - DNA, 201 bp, Homo sapiens
gaaaaaataaaccactccatgaaaatgaaccataaagtaaaaagtagttttaaggcatatatatatatatttttaaggcatatatatatatatatatattwttttttttttgagagatggagttttgctcttgttgcccaggctggagtgcaatggtgcgatctcagctcaccgcaacctctgcctcctgagttcaagcaa

SEQ ID NO: 9967 - DNA, 201 bp, Homo sapiens
tatatatatatttttttttttttgagagatggagttttgctcttgttgcccaggctggagtgcaatggtgcgatctcagctcaccgcaacctctgcctccygagttcaagcaattctcttgcctcagcctcccaagtagctgggattacagacacccaccaccatgcccagctaattttttgtatttttagtagagacagg

SEQ ID NO: 9968 - DNA, 201 bp, Homo sapiens
ctggagtgcaatggtgcgatctcagctcaccgcaacctctgcctcctgagttcaagcaattctcttgcctcagcctcccaagtagctgggattacagacayccaccaccatgcccagctaattttttgtatttttagtagagacagggtttcaccatgttgcccaggctggtcttgaactcctgacctcaggtgatccgcc

SEQ ID NO: 9969 - DNA, 201 bp, Homo sapiens
tggtggtccagagaatgcttccagatcttatcaaagaccatcaaggcggtgcctctacaactctacaagaaccacagcattactgggtttggggtgcctcytaatgcagatacagcctagatcacaacacccaagtccttttggaactggaaagcctttggaagaaagataggtacaaacaagcccatactgtgaaggcta

SEQ ID NO: 9970 - DNA, 201 bp, Homo sapiens
gaaaacttcagaggctcctcccatcttcctgtctcttcctctttagagctatcactgttgggtagaaataaatggcttactttctctttaacttcctgcamcagatatttgattttctaacatattcctcaatgttttatcataaaatctcccagatgacagagaattttaaggttctgaatatgatctcccctaccaaaa

SEQ ID NO: 9971 - DNA, 201 bp, Homo sapiens
tcctgtctcttcctctttagagctatcactgttgggtagaaataaatggcttactttctctttaacttcctgcaccagatatttgattttctaacatattyctcaatgttttatcataaaatctcccagatgacagagaattttaaggttctgaatatgatctcccctaccaaaaaaaatgcattatttaaataaatcttg

SEQ ID NO: 9972 - DNA, 201 bp, Homo sapiens
tggagtgcagtggcacaatctcagctcactgcaacctccctcttccaggttcaagcaaatctcctgcctcagcctctcgagtagctgggactattggcgtscactaccacacccagctaatttttttgtattttagtagagacagggtttcaccatgttgcccaggctggtctcgaactcctgagctctggcaatccgccc

SEQ ID NO: 9973 - DNA, 201 bp, Homo sapiens
ctcctgcctcagcctctcgagtagctgggactattggcgtccactaccacacccagctaatttttttgtattttagtagagacagggtttcaccatgttgyccaggctggtctcgaactcctgagctctggcaatccgcccgcctcggcctcccaaagtgctaggattacaggaatgagcgactgtgcccagccacaaaat

SEQ ID NO: 9974 - DNA, 201 bp, Homo sapiens
gtggcccctgccatcgtgaagcttagatctagtagaaaaatcagtcacgtccaggcgcggtggctcatgcctgtaattccagcactttgagaggttgagaygagcggactacctgaggtcaagctcgagaccagcctggccaacatggtgaaaccccatctctactaaaaatacaaaaattggccaggcgtggtggtgggc

SEQ ID NO: 9975 - DNA, 201 bp, Homo sapiens
gaggcgggagaatcgcttgaacctgggaggcagaggttgcagtgaatcgagatcgcgccattacactccagcttgagtgacaagagcaaaactccgactcaaaaaaaaaaaaaaaggaaagaaaagaaaaacagtcacaaaaataatatttaaaaggataagatgtatacaaggggtatttggaaaccaagaaacaaaaga

SEQ ID NO: 9976 - DNA, 201 bp, Homo sapiens
ttatattcaatgaatctaaataaaacatctgcacaaagatgactacaacagagaagaaaagtttgccatagacaagcgaagttatagagttctaagagttcccaaaagaactgtgaggaaagccctataccatgagaagatcagaggatggtgtgggacaggagaagggaaagaatctcacatgattaccaactgtccact

SEQ ID NO: 9977 - DNA, 201 bp, Homo sapiens
actgcatccaaaaaatgaaaaacatacatgaatgagagaaaataaggtcttcatagtaagtgcttcacatgagaaattctgaagtacttcctgatattgtaaaaaaaaaaattgtaagagaataaacatgatttaaacttctcttgagggtcattagtgttctgtaatgaaaacctgcatttagactggttctggcaaacc

SEQ ID NO: 9978 - DNA, 201 bp, Homo sapiens
ccaggcgcagtggctcatgcctgtaatctcaacactttgggaggccgaggtgggcagatcacctgaggtcagcagttcaagaccagcctagccaacatggygaaatcccatctctactaaaaatacaaaattagctaggagtggtggtatgtgcctgtaatcccagctactcaggaggaggctgaggcagaagaattgctt

SEQ ID NO: 9979 - DNA, 201 bp, Homo sapiens
ggaggccgaggtgggcagatcacctgaggtcagcagttcaagaccagcctagccaacatggtgaaatcccatctctactaaaaatacaaaattagctaggmgtggtggtatgtgcctgtaatcccagctactcaggaggaggctgaggcagaagaattgcttaaacccaggaagtggaggttgcggtgagctgagatcatg

SEQ ID NO: 9980 - DNA, 201 bp, Homo sapiens
ataattcatttatttttcaacaattacttatgaacaatcttttttctttttgtttatttttgtttgtttgtttgttttgagacagggtcttgctttgctgyccaggctggagtgcagtggcatgatcatggctcactgcagacttgaccctgcgggctcaagagatccttccacgtcagcctcccaagttgctgggagtac

SEQ ID NO: 9981 - DNA, 201 bp, Homo sapiens
cctgggtgatgaaataatctgcacaataaacccccatgacacacgtttacctatgtaacaaacctgcacatgtgccccgaacttataacaaaactttatatatatatatatatatatatatatacataaattcaacctaaaaaaagaaagacaggagagaaataccttgagccatgcacacacataaataaatccattttg

SEQ ID NO: 9982 - DNA, 201 bp, Homo sapiens
ctgggtgatgaaataatctgcacaataaacccccatgacacacgtttacctatgtaacaaacctgcacatgtgccccgaacttataacaaaactttatatatatatatatatatatatatatacataaattcaacctaaaaaaagaaagacaggagagaaataccttgagccatgcacacacataaataaatccattttgt

SEQ ID NO: 9983 - DNA, 201 bp, Homo sapiens
tgggtgatgaaataatctgcacaataaacccccatgacacacgtttacctatgtaacaaacctgcacatgtgccccgaacttataacaaaactttatatawatatatatatatatatatatacataaattcaacctaaaaaaagaaagacaggagagaaataccttgagccatgcacacacataaataaatccattttgtg

SEQ ID NO: 9984 - DNA, 201 bp, Homo sapiens
tgactcttgaactgaatcttcaagtagacaaatgaaaaagggaacttcaagcagacaaaaaggtatatgcaacagcacagagacatttaacagcatagtcttcaagaaactgcaagaaggtcaggagtacaaagtggagaagagctttgagagatgaagcagcacaagaccatgagctcttgcatactaaggaggttggat

SEQ ID NO: 9985 - DNA, 201 bp, Homo sapiens
taaaaacaatccactgtatttgaaaattagaaaatatgtggtgatctatactagatcaaccccatttgtattgcaaacatggtataattttctccatcttaaaaaaaaaaaaagacacgatctcatttcctcactctggcaagccatgggattgtacctcaccaagagggtttcagtacttcagtgccttaccccaggctc

SEQ ID NO: 9986 - DNA, 201 bp, Homo sapiens
gggatacatgtgaagcaagtgcaggtttgttacataggtatacatgtgccatggtggtttcctgcacccatcaacccgtcatctacgttaggtatttctcmtaatgttatccctccccttgccctccaacccccgacaggccccggtgtgtgatgttcccctccctgtgcccatatgttctcattcttcgtatatagatat

SEQ ID NO: 9987 - DNA, 201 bp, Homo sapiens
gaattggttgaacccaggaggcagaggttgcagtgagccaagatctcaccactgcactccagcctgggtgacggagcaagactctgtctaaaaaataaatwaattaattaattaattaattaacccatatattgatttcttttcccctagtagccactatcccatttttctgttctctttgcagcaaaattactccctaaa

SEQ ID NO: 9988 - DNA, 201 bp, Homo sapiens
ggttgctaagtagctgaggctctgcgtcatagaggattagtgctgaaatgtgtcagggagagggctctgtcctctcccttttaagttgaaagcagtttggttttttgttttgttttaacattctgaaagagaaagaggctctgaaccgagtttaacatccttctgtacaaaaattttccgacaggacaaataaactactct

SEQ ID NO: 9989 - DNA, 201 bp, Homo sapiens
gttgctaagtagctgaggctctgcgtcatagaggattagtgctgaaatgtgtcagggagagggctctgtcctctcccttttaagttgaaagcagtttggttttttgttttgttttaacattctgaaagagaaagaggctctgaaccgagtttaacatccttctgtacaaaaattttccgacaggacaaataaactactctt

SEQ ID NO: 9990 - DNA, 201 bp, Homo sapiens
ttgctaagtagctgaggctctgcgtcatagaggattagtgctgaaatgtgtcagggagagggctctgtcctctcccttttaagttgaaagcagtttggttttttgttttgttttaacattctgaaagagaaagaggctctgaaccgagtttaacatccttctgtacaaaaattttccgacaggacaaataaactactcttc

SEQ ID NO: 9991 - DNA, 201 bp, Homo sapiens
tgctaagtagctgaggctctgcgtcatagaggattagtgctgaaatgtgtcagggagagggctctgtcctctcccttttaagttgaaagcagtttggttttttgttttgttttaacattctgaaagagaaagaggctctgaaccgagtttaacatccttctgtacaaaaattttccgacaggacaaataaactactcttcc

SEQ ID NO: 9992 - DNA, 201 bp, Homo sapiens
taagtagctgaggctctgcgtcatagaggattagtgctgaaatgtgtcagggagagggctctgtcctctcccttttaagttgaaagcagtttggttttttgttttgttttaacattctgaaagagaaagaggctctgaaccgagtttaacatccttctgtacaaaaattttccgacaggacaaataaactactcttccact

SEQ ID NO: 9993 - DNA, 201 bp, Homo sapiens
ggcggatcacgaggtcaggagatcgagaccatcctggctaacacggtgaaaacccgtctctactaaaaatacaaaaaattggccgggcgtggtggcacgcrcctgtagtcccagctgctcgggaggctgaggtaggagaatcgcttgaacccatgaggcggaggttgcggtgagctgagatccagccactgcactccagcc

SEQ ID NO: 9994 - DNA, 201 bp, Homo sapiens
gacatttaagtgtcagaaattggtgcaataaaaatgcaatgggcttctcacctgagttatccttactaaaggaaaaaattacagtcttttccctttacaattttttttttttttttttgagacagagtctcactctgtcacccaggctggagtgcagcagatctcgactcacttcaacatccgcctcccgggttcaagcta

SEQ ID NO: 9995 - DNA, 201 bp, Homo sapiens
tttagtagagacagggttttaccatattggccaggctggtcttgaactcctgacctcaggtgatccacccgccctggcctcccaaagtgctgggattacargtgtgagccactgcgcccggcctttgtctttattcctcattgtatttctttttttatgttataagagaagtaaatcatggatggtacataacctattgaa

SEQ ID NO: 9996 - DNA, 201 bp, Homo sapiens
tagtagagacagggttttaccatattggccaggctggtcttgaactcctgacctcaggtgatccacccgccctggcctcccaaagtgctgggattacaagygtgagccactgcgcccggcctttgtctttattcctcattgtatttctttttttatgttataagagaagtaaatcatggatggtacataacctattgaaga

SEQ ID NO: 9997 - DNA, 201 bp, Homo sapiens
ttaaaacccttcagggatagctcacttatgatgcaaacctgagcactggcctcatattttataatatcatgagtaacatctgagggtaaaagtgtttgccrggcaatgagtcaccttgttggacaatttaagacaagtaaggctggatctttccagtaagctgctcaaatggcagaactccaatttttcgtcatgctggga

SEQ ID NO: 9998 - DNA, 201 bp, Homo sapiens
gtgtgtgcgggggaggtggatgggaggaaaaggcatgtattaatagatactgctgctataaaatgacataaattatagcccttgatctgtttctgtaaacwatgccagcttcttcaggttattggcaactacccctaatatacctagcccagatcctttcataaagtcaagtgctatatttccaaaataatcctatgaaat

SEQ ID NO: 9999 - DNA, 201 bp, Homo sapiens
cttcctcgagtcctcatgtatgtcatggttcctcttttaggaaaacatgagtacaagacgcaaagcaaaagaagagactaaaggcaaattaccccatcacmtcgtttcgtccctccccttcgttattatagaagagcttgatcaaattccctttgtcgcgccacacacacgcagagtaggtgaagggcaccctaagacaac

SEQ ID NO: 10000 - DNA, 201 bp, Homo sapiens
atttaattgtattatatttctgtagcccaaattttttattacgaaccatgctttataagcaggccaaaatattatttttaaaagaatgatctgttcaggayagtgattgcgtcctttttcgtttggctgtgacaaggatagcacactgtttacactcagcgctgaacaataaatcagcctgaggatttcctttcctcacac

SEQ ID NO: 10001 - DNA, 201 bp, Homo sapiens
aatccagtgccatccattttcaggggaaccctgactaatacagggatcattcaataaaaagactccaactcttagaaatcaatttagtcactatttattayattgacatatttacaaaataatacaaagtgaaataccactctaattcaccgtattacacgagggctgcatacaggcaagacaaagtatatggaaaacatt

SEQ ID NO: 10002 - DNA, 201 bp, Homo sapiens
aactataacactgtggagcagcctcattaccatccaaggaagttctgcaggtgaaagctcaagctggtacgtcttgcagagatgtggagagcccctgtgcrtgcttttatcatgtctcagctgtgtctgtcattcattatttgtgcatccacttgccacctccctccaagttttcattttatgaagaacctcctctggtcc

SEQ ID NO: 10003 - DNA, 201 bp, Homo sapiens
aaacctgcttgagaaaggcctgtgccacggtgctagactgcgcatgcgtcggcgactggcggccgggtttgagagcaaagcgcgttagccctgggcagctyctgccgggctgttctgggatccttagtgaaagttggaacttgaccccagaacttttgcgcagtgcacaagcagtgcattcgtgtttcttaagtaaatctt

SEQ ID NO: 10004 - DNA, 201 bp, Homo sapiens
tattcctcctagttgcccctagtggtgttttggcaccctcaaagtgagtgagagtgcgtgtgtggagacgcctgcggaaaccgccccgatccctgagcctrtttcctcgcgaggtgattttcacttggagctggtttgcccctgcactgtcaggctcggaactgtttgccgttgctgttctggcccttttgctgaccccac

SEQ ID NO: 10005 - DNA, 201 bp, Homo sapiens
cacttgtttcttctaaaaatcccactgccatcaacttaatatctctgttcagtggttatgttcaaagttccccagacaaatcaatgagtccaaaaatcagytgaaagaagaaaaagagaatcatcaatgatttattatttatgacaaaacttgagtatgttgtggaatgcactgtaccaggagcttcagaggtcacagaga

SEQ ID NO: 10006 - DNA, 201 bp, Homo sapiens
tactttcctgcacttattttctttcaaaatggcagaaaaacaaacttatgctttttcgtggtaaacaaaagttgataaagcacaaatggtacttgacactstttttagtttctgatgaagtatagtacctgtcatagctccgcatatctgctactcacagaggtcaatgtaattctttccaattttctcttataaataatt

SEQ ID NO: 10007 - DNA, 201 bp, Homo sapiens
gatgtacagaaaagttacatgtctatggatgctctaaaactttcattttacttttaatataagagctaatcacatttatcaaatggttttgaagtcttagrtaccatgctgaaagtgccatactcagtatttcacttaattgtcacagctctaagaggaaggtactaatattatttcccctttacatatgagaaaaatctg

SEQ ID NO: 10008 - DNA, 201 bp, Homo sapiens
agctctggagtttgcttatgttttacacactttccagatttaaatttaattccaggccctattgtgtttcacagatagaagagtaaactaataccaataayaagaggatactgaactattcttaagaaacaactcaaatccacagatcactccttacttataatagacaagtgtgttatttgactccaacatgataaaagg

SEQ ID NO: 10009 - DNA, 201 bp, Homo sapiens
ccaagactgtctcaggcattggcaaatgctgtaaaaacacagcaatgtaagggggtggtggcaattttagacaggatagtcagagaaggcctctctgtagrgaaatctaagcaaaaacttgaacgctgagggatcagtcaaacaggcagaaagaatagcaggtgtaaaggtcacaaggctaaaacaagcccagtgtgttgg

SEQ ID NO: 10010 - DNA, 201 bp, Homo sapiens
atgtcatcagttccttgaggagtaacgatcacgcatatatttatttgtaatctgtacaagtcactcaatcagcagaagataatcggctgcaaggacctttkgcctctcttgactattaaataatagagcccaaaaagattctctgttcagaacaaacaccgcctactaaaacatcccgaatagctccaacccacacttatc

SEQ ID NO: 10011 - DNA, 201 bp, Homo sapiens
gacaaagggttctgcaaatctgctttagaagggtggcttatattccagaagctaggaaggaccattgagaaagtgtggaaaggacaatcacagggtcaaawctgcctttttaaagcaaagtgaagggcagactggggtagaggacatagggaacagagaaggggccaggagaccaactgagggggctgtctcaaccaccca

SEQ ID NO: 10012 - DNA, 201 bp, Homo sapiens
atgattttaaggtaaacaacaaaatgaaggtggaaatcaaaaaatctttgaaattaatgaaacagaattacaacataccaaaatacttgggatataatgaragtagttttaagaggaaagtttatagcactaaatgcctacatcaaaaagtttaaaagttctcaaattaacaatctaacactgcacctacaggaactggaa

SEQ ID NO: 10013 - DNA, 201 bp, Homo sapiens
aattaacctaaagagcttctgcacagtaggagaaactatcaacagagtaaacaaactacagaatggaagaatatattcgcaaactatgcatccgacaaagktctaataaccagaatctatcaggaacttaaatgaatcaagaagaatatattcgcaaactatgcatccgacaaagctctaatagccagaagctatcaggaa

SEQ ID NO: 10014 - DNA, 201 bp, Homo sapiens
tatacacacactagtgatgcataaagaaacaaacggtgaaggatattatctgtaaatgcaactgttgaaggaaggtagaattgtgaggaaaaaggaaactrttccagaatcaaaacaaggagggggaagagtattttcagaaaatgctcccaaggtcactatgttcataagtaacaccacgtggcctgaagaatagaggtt

SEQ ID NO: 10015 - DNA, 201 bp, Homo sapiens
tgcataaagaaacaaacggtgaaggatattatctgtaaatgcaactgttgaaggaaggtagaattgtgaggaaaaaggaaactgttccagaatcaaaacarggagggggaagagtattttcagaaaatgctcccaaggtcactatgttcataagtaacaccacgtggcctgaagaatagaggtttttatgccagtattttc

SEQ ID NO: 10016 - DNA, 201 bp, Homo sapiens
tggaatggtattcaaccagcataaccatagatatggcaaaggaagtccactccatatctgacgttctaagtaaggaacagtttattgatgataaatgttcsaagtagctcactaggttcattacttctttttcaggattttcttctaaatatttaatagatatatactttatcttctaaaacataactactacaataatag

SEQ ID NO: 10017 - DNA, 201 bp, Homo sapiens
aatgtttattcaaaccctcttattttccaaatgagctaactaaaacacagagaggttcagggatggtccccaaatcacacagaacaccatttcatcatttyatatattaataagcctttactgatcattggtaggcaaaagcatcattgaacacggccagagtcttggctttagcctgggtctctggactccagttcagta

SEQ ID NO: 10018 - DNA, 201 bp, Homo sapiens
aagcagcagaggaagaaggtttcaagaagcagggagacgtgaactgagtagaaaactggcaaacagctgattaagatgagggtagagaagtgtcccagtawacagaatataaatttcatgagtgatgttgataaaagtaattgtaatgtggtgatgggaacaaatgccagattggaatagactgaaaaacaaaagagatgg

SEQ ID NO: 10019 - DNA, 201 bp, Homo sapiens
aaatagatgaaacacttgttagtatgtttttactagtcaaagagaacttctccatggtttgcttcaaccctaaggctctgggccaacccaagccccaggcygcaccctttacccaccaatgctccgtccaacctggcagcgagcagtagccatgaggactgcgctcttacccgcatggcagacacacttcagtcaaactcc

SEQ ID NO: 10020 - DNA, 201 bp, Homo sapiens
ctcccaagtagctgggatgacaggtgcccgccaacacgcctggctaatttttgtatttttagtagagacagggtttcagtatgttggccaggctggtctcsaacttctgacctcaagtgatccccccgcctcggcctcccaaagtgctgggattacagatatgagccactgagccgggcctaccctgactcactttgaaac

SEQ ID NO: 10021 - DNA, 201 bp, Homo sapiens
taaaagaagctctggagtttgcttatgttttacacactttccagatttaaatttaattccaggccctattgtgtttcacagatagaagagtaaactaataycaataacaagaggatactgaactattcttaagaaacaactcaaatccacagatcactccttacttataatagacaagtgtgttatttgactccaacatga

SEQ ID NO: 10022 - DNA, 201 bp, Homo sapiens
ggtttataacccaaagcaatgagtcttttggtgtccggaatcagttttcttaacaaaggagatctgattctttcttacatttctgtaatgttcttctttgmctctgatgatgatgcagactaacacttgaattttagatcaggaagaaaaatacacagctttagaaaattctactggagctaatattgttgtgtggtctag

SEQ ID NO: 10023 - DNA, 201 bp, Homo sapiens
gttcacaatctaagaatcaggtcctaagaatcaggttgagcctgggatgctaggtgctgggattcccctgccatcacagcttatagggctctttctaagaragcatgactttttcattgatctgctggtcttcagagaggagtaaaaggaaccacggcatagaattttggtggaaaaattccatgctacaacagaagcagg

SEQ ID NO: 10024 - DNA, 201 bp, Homo sapiens
taaaaattttaaggatctcaatttcctagagaaacgttgccaggaaggttttaagaatagttgagctacagcataacttactgctactagaaaatgatacrttgtaaaaacaacacattttcagttataaatgtttctagaagtttatgtgtttataaagaccatatattttgaaataatttcttccttttttaacaaaca

SEQ ID NO: 10025 - DNA, 201 bp, Homo sapiens
gcctctctgtacaagcataatagagactcatgaagaaagacagtgggacttaaatataaaaagtagttaggaaacaatttgacagtgatagctgaattctrtcattggtgatggcatttctttaaaggtgttgtatgttttagaagacttaaacttgcaccaatgtggaatatggctcctagatgggtctcactttcggag

SEQ ID NO: 10026 - DNA, 201 bp, Homo sapiens
atggtcagaaatggccacaggcaagctaattaggtagttcccctgaagtgaactgttaatatattaaagccatgcaaattagatcatacccagaggtcctyggtttggaaaaaatgctctggtaaagtaggaatttttaataaaaatgataattatgaccccacagcactgatagtatttttctctagtgttccaattttt

SEQ ID NO: 10027 - DNA, 201 bp, Homo sapiens
aaaggatatctaaaggagaagataacagcgtaaaagtaaaaatgattaagggcactttgcaagaacctaattttccttctttgttctatgggttcattcayttattcagcaaatatttacagatcattcatgcattgatattggctttgcactgtgaatgctaccataaataagactgactacatccctccctcataaagc

SEQ ID NO: 10028 - DNA, 201 bp, Homo sapiens
agggtcagagaagtaaagtgacttctaggaggatggcaggtaaatgacaacctacatttgaacccagctttcaatattcagatctgctaaaagcaggcaaygctgccagcacctttggatttgaatctttaattacaatttgacttatagcactcattaatccttggatatcttgaattccaaggaatgtaagtacttcaa

SEQ ID NO: 10029 - DNA, 201 bp, Homo sapiens
aaattaacatctggacctttcctgatacaagttcacaatctaagaatcaggtcctaagaatcaggttgagcctgggatgctaggtgctgggattcccctgmcatcacagcttatagggctctttctaagagagcatgactttttcattgatctgctggtcttcagagaggagtaaaaggaaccacggcatagaattttggt

SEQ ID NO: 10030 - DNA, 201 bp, Homo sapiens
gaagcagacctactgagaaaaaagtagagaaaaaagacagacagagagaatgctatttgaattcctggttccacttgttcctgaagtccacctttactccrcccttcccaatagtttggctgttccaatttatcgtgaaacctatgagtcaaattctccacattatgctcaacctaaggcataatgctcctgggtgagcat

SEQ ID NO: 10031 - DNA, 201 bp, Homo sapiens
gttgtacagctaactatgcccttaatatataacttgacaattttgctcattaacttttgctcacattagtaattgtgcttggtcttacatcagacaaaatrcccaagtcaaacttatgcaggaggaattaacaaacaaattagcaatattaaaaggatagttacactctactaatagtcgtgtgtttctggttaaataaaa

SEQ ID NO: 10032 - DNA, 201 bp, Homo sapiens
agctattttcccagaggctgataactaaattatttttaagtgtttatgaacacttactgtacacgctagaggaaaaaagaattgactgaaaatcactaacrttcagaaattccattttaataaagggcagagatgtgtgattaacactataaatataaaaataaatgtatcttatcaaaatcccagtgatgttttctgcac

SEQ ID NO: 10033 - DNA, 201 bp, Homo sapiens
catgcaccatcacacccggctaatttttgtatttttagtagagatgggggtttcaccatgttggccaggctggtctcgaactcctgaactcaagtgatccrcccaccttggtctctgaaagtgcagggattacaggtgtgagctatcgcactgacctccctttgcaaccttaaaggaaatgttccacctagtgaaggcaag

SEQ ID NO: 10034 - DNA, 201 bp, Homo sapiens
ctattcttaagaaacaactcaaatccacagatcactccttacttataatagacaagtgtgttatttgactccaacatgataaaaggtaactccatgaagtytgtatgatcttgattttgagaaaccttcacaccaattaatcatcttctacctccttccagaagttcaggttgctaaaacatgagccattccttctgacca

SEQ ID NO: 10035 - DNA, 201 bp, Homo sapiens
cttacatagtaataaaataatggaagaaaaaggaccacaacagaatttctcagaactttctcccataatgttactcccttaccctgcaggaaaaaaaaagrgataatacttcattgtctgaacttctacttagatggcagtgtcctcatctaagtatattataacctacattgcactgtaccaagtattggaaaaatacaa

SEQ ID NO: 10036 - DNA, 201 bp, Homo sapiens
acagaatttctcagaactttctcccataatgttactcccttaccctgcaggaaaaaaaaagagataatacttcattgtctgaacttctacttagatggcastgtcctcatctaagtatattataacctacattgcactgtaccaagtattggaaaaatacaagaattgttaaccaaaaatgcccattttgagaattaacaa

SEQ ID NO: 10037 - DNA, 201 bp, Homo sapiens
attatctttctaaagctaaatgcctctaagcatacattaggcatggttctaggactcctgcatgaccttcagagtgatctcaaacaccacactttgcaagycacttatacgcaccaagatcttcaacattttgtgtttggcttgactacttcctgtctctttctttgttgtgaaaaactgattggctttcagtgcccttgg

SEQ ID NO: 10038 - DNA, 201 bp, Homo sapiens
caaccaaataaaaaggtccaccggccaagagagatttcatcatgggcaaacatcaacatgctcacttacttttcacatttcatagattttatgaataatgmccagagcacctctgagaactccaggtattactgtgggtaggtaaaaagcaaatatggtcagaaatggccacaggcaagctaattaggtagttcccctgaa

SEQ ID NO: 10039 - DNA, 201 bp, Homo sapiens
atatttgaaatacagatccattccttctctttgtatttctttgaatgtgcaatgaaggcctcagttcacgatttcatttttgagagaacagcagcttcaaytgaacatgggtctaggtgcagcaatactggtcacaatggacaacctcacagtcacttattcatttacaggtgaaactgctcccaactaagagaggtccac

SEQ ID NO: 10040 - DNA, 201 bp, Homo sapiens
agatttagtctcaaaatctctacaaccctgggattataatattggaaatatatattgtctccttcctataaattaattgggaatactaaaaatttaaggcwttatcctataagcttttgtcatctacaatttttcaatgtaaaatatttgaaatgtaggtgaatattaactttaggaatagtactggtattgctttgtcct

SEQ ID NO: 10041 - DNA, 201 bp, Homo sapiens
tgggtcaaatggtatttctagttctagatccctgaggaatcgccacactgacttccacaatggttgaactagttaacagtcccaccaacagtgtaaaagtsttcctatttctccacatcctctccagcacctgttgtttcctgactttttaatgactgccattctaactggtgtgagatggtatcttattgtggttttgat

SEQ ID NO: 10042 - DNA, 201 bp, Homo sapiens
ctatttctccacatcctctccagcacctgttgtttcctgactttttaatgactgccattctaactggtgtgagatggtatcttattgtggttttgatttgyatttctctgatggccagtgatgatgagcattttttcatgtgttttttggctgcataaatgtcttcttttgagaagtgtctgttgatatccttcacccact

SEQ ID NO: 10043 - DNA, 201 bp, Homo sapiens
tttgagaagtgtctgttgatatccttcacccactttttgatggggttgtttgtttttatcttgtaaatttgtttgagttcattgtagattctggatatcasacctttgtcagatgagtaggttgcaaaaattttctcccattctgtaggttgtctgttcactctgatggtggtttcttttgctgtgcagaagctctttagt

SEQ ID NO: 10044 - DNA, 201 bp, Homo sapiens
ttgagaagtgtctgttgatatccttcacccactttttgatggggttgtttgtttttatcttgtaaatttgtttgagttcattgtagattctggatatcacmcctttgtcagatgagtaggttgcaaaaattttctcccattctgtaggttgtctgttcactctgatggtggtttcttttgctgtgcagaagctctttagtt

SEQ ID NO: 10045 - DNA, 201 bp, Homo sapiens
gggttgtttgtttttatcttgtaaatttgtttgagttcattgtagattctggatatcacacctttgtcagatgagtaggttgcaaaaattttctcccattytgtaggttgtctgttcactctgatggtggtttcttttgctgtgcagaagctctttagtttaattagatcccatttgtcaattttggcttttgttgccatt

SEQ ID NO: 10046 - DNA, 201 bp, Homo sapiens
aaagaattttcacaccacaaaccagtgttcccttttataaagttgcgcttccaattcagttcaatatatatttcctgatcacctgctatgttccagatacyatgggtataaatatgaaaagatgaagctccagttattaaggagcttatgaaagattgcagaaagtagatgtgcacccagaccattaaaaaaaatactata

SEQ ID NO: 10047 - DNA, 201 bp, Homo sapiens
agctacaacacaaacctacagttcactctttcttggatttgaataaaccccacaatatatgttttcaatattgggagtttttctttgcttctttattgcartaacaaacactaataatttcaccaaaaaaaaaacctctcaactatcacagttgactatgtttattggtaaagataagcaaaagatcatgaaagccattag

SEQ ID NO: 10048 - DNA, 201 bp, Homo sapiens
ctagcacagagaatggcacagagggtccttttaaaatgtctgagaggaatgtgctatgatctcagtcgtctaataggattcaccttttctacaattgcctrttttctgaactcagctccgaaatgagctattctctgtttcactctttttcacattatccaaaataattcaatgtccaccttttcctttgggaaaatcaaa

SEQ ID NO: 10049 - DNA, 201 bp, Homo sapiens
tagtttgtatttctgtgggatcgatggtgatatcccctttatcatttttattgcatctatttgattctcctctcttttcttctttattagtcttgctagcrgtctatctattttgttgatcttttcagaaaaccagctcctggactcactgattttttgaagggttttgtgtgtctctatttcctttagttctgctctaat

SEQ ID NO: 10050 - DNA, 201 bp, Homo sapiens
ttcctatacaccaattacagacaaacagagagccaaatcatgagtgaacgcccattcacaattgctacaaagagaataaaatacctaggaatccaacttamaagggatgtgaaggatgtcttcaaggagaactacaaaccactgctcaacaaaatcaaagaggacacaaacaaatggaagaacattccatgctcatggata

SEQ ID NO: 10051 - DNA, 201 bp, Homo sapiens
gctcagcttctgtcatttgctaaggaaatgaaaaaatacttaatctctctactattttctcattttttaaaaggaataataccttcttagctacctcaccrgactctttaagaatcagattgggcattatccaaaaatgctttggaaactacttgtaaagcacgatataacagcaaagaattatcactacatgtcccagac

SEQ ID NO: 10052 - DNA, 201 bp, Homo sapiens
aatagaaatatcaagagttcagtcctgaaacttaatccattatatattaacagaatattattatatttagaaataataatacttaaattcaattgcaatgkctccctcattgttatttgcccagggcttccaacagtgtctggcaacaaggcaagtgcacgataaatatttgcagaatgaataaaatttcctctggtaatt

SEQ ID NO: 10053 - DNA, 201 bp, Homo sapiens
taaagacactgggaagaagccatcctgtggagatacacaaggcttgctgttcttcatgcattgtcatggatgctgcaggagttattttcttttattctccrtgacttatcaaaaaggagtactacagatttaataatggataagcagcaaaatttgaaccataggcaaaatcaaacttcaggatttacctatattattcta

SEQ ID NO: 10054 - DNA, 201 bp, Homo sapiens
ctgacctcaggtgatctgcccgcctcggcctcccaaagtgctgggattacatgtgtgagccaccacacccggccaatgctatatatattttaccacaattktttaaaggctacacagctgtccaagaaatatgctatggaattctaaagaggaaaaataataggagattaggaaaagggatttattttagatgcaccttga

SEQ ID NO: 10055 - DNA, 201 bp, Homo sapiens
tgcactaacaatgttacaaggatgttatttaggggtgactcaaactacctccagtcttaaagtcaacataatgaaggaatattaagatataaagcaaaaasatcacgtatctagtacagttacttggtggcctgttaacgtgcaaactgtctaagcaatagtttccctttgtgggagttgtgagctatgaaatcatgccag

SEQ ID NO: 10056 - DNA, 201 bp, Homo sapiens
taagcctctgaatgtagacactctaaaatatctcttactaaaatgttcataaagttggaaacaccataaatggtgtatgattatttccttaatgtacagcrcacttaacaaatactatagaaataactgcaaaaacaataaaaaggtatttggcaaagtaagtaaagaccttcaaatattttttccaacattaacatctta

SEQ ID NO: 10057 - DNA, 201 bp, Homo sapiens
tttcaacaggtaataaagccactagtactgtttactagagtgggaaggcccattacataatagtgttaattacttaagaaaactttactagtaagttgagyctgtagcatttgggtacaaatttatgtaaaataaaatgtcaaaaaattaccatgatctcagttaattctaatctatttccacattgtattcgcttgaaac

SEQ ID NO: 10058 - DNA, 201 bp, Homo sapiens
ctgaggaatttgacactatttgtggtttgtgtgtgctgtaccacccatgggccagtactaataaaacaggattatggaaattagcttgattcatcattttytcccttcatcttgcttttgcccttttcagcctttgctgaggactatgtctgattatgatacattttttccttttgacctaaatacattaaatttaatcag

SEQ ID NO: 10059 - DNA, 201 bp, Homo sapiens
ggtggaatcagcactataattagacacaacctaagagtctgagaaatcaacactaactcccaatgaaaagaagaacacagaatgaataaaatatttaacaygttcaacaaggaagatcacatttccagaaagaaaagagcattactgtatcagcacccatttctttgtccttggatagtacagtcagcatggcacaggcat

SEQ ID NO: 10060 - DNA, 201 bp, Homo sapiens
atcagtaataagaaacctaccaacaaaaaaaaacaggtggattcacagccaaattcttcctgatgtacaaagaaaaactggtaccagtcctgctgaagctrttcccaaaaaatcaaagaggaaggactcctccctaactgactctacaaagccagcatcatcctaataccaaaacctggcagagaaacaatgggcaaaaaa

SEQ ID NO: 10061 - DNA, 201 bp, Homo sapiens
gtgtatcagtgggtcccaacagaaggggcatcatcatcctcattctaagaaatcataccttcaaatatcccctgaattacaaaataagtatgctacatgtrgtatcagtttaggactgcacaatatgaagcttcaaattattttcatactgatgctaatatcacagtaaatgatgaccctaaaggacatgcagagaggaca

SEQ ID NO: 10062 - DNA, 201 bp, Homo sapiens
cctaaaggacatgcagagaggacataaatggagaagggttgttccttagctgtaatcttgtcatcagttcactaaaccaaaacctccctattctcagcaawttaaaagccaatatttctgttttgattattgtccaggccacaactcatttctaatgggtaattttttaagtcattcgttcaaaaatacagtaatttacca

SEQ ID NO: 10063 - DNA, 201 bp, Homo sapiens
ttataagggaaaatatgaagtaaaacccgtactgtatagactaaaagcaacacagggtcagggattgagtttcattcacatttgaatacccagcatctacyacaaagtccaacattgagcagacaatgtgatgatttaaataattgcttcacttgcacaaatttccatgaaaacagaagcaaacagaaagtagaggggcta

SEQ ID NO: 10064 - DNA, 201 bp, Homo sapiens
tttccactctttctctgtatctaaaaggttgcaaagtcccagccatcccaactcataattatcactttaatcttttttgttcctctctatccctctattcrcctcctttctctggccttatcttctgttgaatgacttcagtaccagtcctgctcacgcctagttttgtcccatccaatccacccctctctattgtgagtg

SEQ ID NO: 10065 - DNA, 201 bp, Homo sapiens
ttagtacagacagggtttcaccgtgttagccagaatggtctagatcttctgacctcgtgatccgcccacctcggcctcccaaaatgctaggattacaggcrttagccgccgtgcctggccataagaagtaatttctaactaatagggttgttgtcaggatcaaatggtacaatgtcttgctattcaaaatgcagcctgtgg

SEQ ID NO: 10066 - DNA, 201 bp, Homo sapiens
ctccagtgagaatacttgtgtattctaagtagattcacttgcaccttattctctgagaagctttttgtggttgccattttctgaatgatatatttcttatytgattaaaagtggatatttttcagattctgagagaaagaaggtcattgagcaaattttttctaaagcaaacaggactgcacttgcctcattaggcatttc

SEQ ID NO: 10067 - DNA, 201 bp, Homo sapiens
atacttgataacaacctgaatcaagagggaaaaccccctacaggggcagcccagactcaaacatttatatccagttataaacatttgcataagtcgttagrgctttaatagtttagaaacagaaatgtgagctgatgtgaagagccctatataaagaatatatgaatccttttgatttggccagagggacattttgacttt

SEQ ID NO: 10068 - DNA, 201 bp, Homo sapiens
acgcattatttttccatcaaaactaaagataaaacagataaatatgcaaatcctggagaccaaaggagacctgaagctgtctgaactagaaattgaccttwtgagaccaatactatgatggacaggaatcactctccatatagtccccagcacgcaagacagataattaagctagctggaccatgcatctaacttaccaaa

SEQ ID NO: 10069 - DNA, 201 bp, Homo sapiens
tacatcgtaggacattctacatcaggccaaatgtaccaaaaaactgaagtaaaggatctgaaagccacattaattcattgcctgctccatctgtattgtcwctccactccttactgactttttttcttattattcttccaactcttaatgtttttgtttgtttgtttgtttgagatggggtctcactctgttgcccaggct

SEQ ID NO: 10070 - DNA, 201 bp, Homo sapiens
tcctattaaaactttaaagacagaccatgtttctcctttgcccacatccctccaatggtttcctgtttcttcaagggtaaaagctaaagtcctttagggcyttaagtgatctggcctcacttaccccttgaacctcatctccagctactcttcctcttggtccttctgctctggccacattgcccagtcagacatacccct

SEQ ID NO: 10071 - DNA, 201 bp, Homo sapiens
gactccatttcaaaaaaattaaaatacaatacaatacaatacataaaataaaataaaaataaaataacagatcatctctaaatactaaataccttaatgaytttttatgatcacaatagaatggaatgaaaaagggagaaaagcagggtgagaaggaagaaggaaagaaggaagtgtaaaatgaaagaggtaaagtctcta

SEQ ID NO: 10072 - DNA, 201 bp, Homo sapiens
caacaagtctctaggaagttccaaactttcccacatcttcctgtcttcttctgagccctccaaactgttccaacctctatccattacccagttccaaagtygcttccacattttcaagtatctttatagcagtgccccccactctgggtaccaatttactgtattagtccgtcctcccactgctataatgtaatacctgag

SEQ ID NO: 10073 - DNA, 201 bp, Homo sapiens
acctgccctctccactccatcctgtggctttctccccaacttaggaaacaatgattgcctccacagtggggaccaggccagtatttattccaagggcttcygtttgggtgaatgcagccccaaaatttagagttaagtatatttacccatagaaattgtaataaagctgagaataaaaatcaagctgtcacagcaaactca

SEQ ID NO: 10074 - DNA, 201 bp, Homo sapiens
cctttcgtatggctgcatagtgggaaaccaagcaacagtacaggtaagtgtgcccttggcattgccctccacagcaacagaacttgaaggaagaaaagttwtcctgaattctaggtggcaataagcagaaagagcagcaggggcccaaggtaaggctgggaacaagacagagctgagaagaagtgcagagaagcaactgcc

SEQ ID NO: 10075 - DNA, 201 bp, Homo sapiens
tgccaccagtctctttactaaaacacagcaagagtgacctttactccaattcccaacaagttcctcatctccatttgggaccacctcagcccgaacttcaytgtccacaccattatcagcactttggtcaaaaccattcaacaagtctctaggaagttccaaactttcccacatcttcctgtcttcttctgagccctccaa

SEQ ID NO: 10076 - DNA, 201 bp, Homo sapiens
gcaaagcctcatcatttctttctttggactacttttttggtttcctttgaccactgtcagttcagcaatattttgaggtggaatcagcactataattagayacaacctaagagtctgagaaatcaacactaactcccaatgaaaagaagaacacagaatgaataaaatatttaacatgttcaacaaggaagatcacatttc

SEQ ID NO: 10077 - DNA, 201 bp, Homo sapiens
ttgccagagaaatgtcagaaggccacagacataaaatgcccatttggaagatgtagtcaatttaagtgtgaactatccagtttgatgatcctctggcatgycattgtgcccagagtgtatacacaaccaagagtacaaaattgaaagtacactgctaatcgctcacagcaacagcaataaaaactttaaatgctctaaatt

SEQ ID NO: 10078 - DNA, 201 bp, Homo sapiens
gaaagtctattatctaacagaaatagcaatatcctgagtacactgtgagatttatattgtgactttcactttttaaagttttatatgaatatatatctatrcaagttatattgtataaagtatactagctgagctttttgttcttgcaacatggcctaaaaaatagtaatttcctaaccatcatcaacttaatttttaaga

SEQ ID NO: 10079 - DNA, 201 bp, Homo sapiens
gacacatgcacatgtatgtttattgcatcactattcacaatagcaaagacttggaaccaacccaaatgtccaacaatgatagactggattaagaaaatgtrgcagatatacaccaaggaatactatgcagccataaaaaatgatgagttcatgtcctttgtagggacaaggatgaagctggaaacaatcattctcagcaaa

SEQ ID NO: 10080 - DNA, 201 bp, Homo sapiens
ttctcttagttaccactcttgcctcagaagagccagaatgagaggttaaagacttaaatcacatcatgtcacttctgctcacaacccttcccaatgtcctygcatggcctagaagcccaccagctctcccacctcatgctcagtccccttccctcattctgctccagccacactggactgctgctgcccttgaagcacatg

SEQ ID NO: 10081 - DNA, 201 bp, Homo sapiens
aaatttactgcaatgcatctttagtgagcactcattatatgtgctgtggacttactaggtccgggcaattgagttgtgaagaaaacagaaagagctcctgmcctcatgaagcatgtggtctagtaggaaaattagacactatacaaataataacaacactggaaagcatcacaaaaaaaaaaggaagcacaggggatgtgc

SEQ ID NO: 10082 - DNA, 201 bp, Homo sapiens
tttgaaaattagaaaatatgtggtgatctatactagatcaaccccatttgtattgcaaacatggtataattttctccatcttaaaaaaaaaaaaagacacratctcatttcctcactctggcaagccatgggattgtacctcaccaagagggtttcagtacttcagtgccttaccccaggctctgctttccagagaaccta

SEQ ID NO: 10083 - DNA, 201 bp, Homo sapiens
ccactaccacacccagctaatttttttgtattttagtagagacagggtttcaccatgttgcccaggctggtctcgaactcctgagctctggcaatccgccsgcctcggcctcccaaagtgctaggattacaggaatgagcgactgtgcccagccacaaaatgcagttttgaacctgcggaagttaagagtgtaatatgaaa

SEQ ID NO: 10084 - DNA, 201 bp, Homo sapiens
tatacaatgagatttttttaacttgacaaatgattataaaatacaaccagaagataaatatgtgagaatagttggaaaatgttttaaactgtgtgaattartgtagagcaagcttgtccagcccatggtctgcaggccacatgtggcccaacacaaatccgtaaactttcttgaaacattatgagattgagattttttgtg

SEQ ID NO: 10085 - DNA, 201 bp, Homo sapiens
ttctgttgatttgtggtggagagttctgtagatgtctattaggtcggcttagtgcattgctgagttcaagtcctggatatccttattaatcttctgtctcrttcatctgtctaatattgacaatggggtgttaaagtttcccattattattgtgtgggagtctatgtctctttgtaggtatctaaggacttgctttatgaa

SEQ ID NO: 10086 - DNA, 201 bp, Homo sapiens
actgatctggttataagagcaacacaaacatggccagggaaacgttgctaatgatctaatggactaatggaccttagttctctcctcttggaaattagaasatggtaattaaagatgtctctctccttcagcttctaaatataatgccggaggaagcatatagactcactgtgaacaagcaggtgcctggagagtcagcaa

SEQ ID NO: 10087 - DNA, 201 bp, Homo sapiens
atttcttccagaaaatagaaagaatacttcctaaagttctctatagaaacttgtaaatgttttgctgttagcctgtaaatgttgtaatgttgtaaatgtartgttgtaaatgttgtaaatgttacagtgttagcagtgtaaatcactgctttaaattcaatacataaaaagttggtgcttcaatatgctagaaagcattta

SEQ ID NO: 10088 - DNA, 201 bp, Homo sapiens
caaaactggaaagagaatgagtttgacgaattgacagaagtaggcttcagaaggtgggtaataaaaaactcctgcgaactaaagaagtatgttataaccawatgcaaggaagctaagaaacttttaaaaagttagaggaattgctaacaagaataaccagttttgagaagaacataaacgacctgataaagctgaaaaaca

SEQ ID NO: 10089 - DNA, 201 bp, Homo sapiens
taatctaacactgtttgaaatattatgtgaattttaaatagccacttgtatatatagctccttctgcctaaaacagaatttctgtacaaagaccactggcytggtttccacagatggtcctggttcaagccctgatgtcctaccacaattattgctagtgtccctttctttaaaaaaaaaaaaaaatctgatttggacaat

SEQ ID NO: 10090 - DNA, 201 bp, Homo sapiens
catcgtgaagcttagatctagtagaaaaatcagtcacgtccaggcgcggtggctcatgcctgtaattccagcactttgagaggttgagatgagcggactayctgaggtcaagctcgagaccagcctggccaacatggtgaaaccccatctctactaaaaatacaaaaattggccaggcgtggtggtgggcacctgtaatcc

SEQ ID NO: 10091 - DNA, 201 bp, Homo sapiens
ttttttttgagccagagtcttactcttgtcacctaggctggagtgcaatggtgcgatcttggctcactgcaacctccgcctcccgggttcaagcgattctyctgcctcggcctcccgagtagctgggattacaggcgcccaccatcatgcctggctaatttttgtacttttagtagagacagggtttctctatgttggcca

SEQ ID NO: 10092 - DNA, 201 bp, Homo sapiens
caagattagatgctaaagatacaaagagaagacaggccttttcccaaggagttcacagtccaaggagcagcttttaacctgaaggagttgtacaaatgcasgtatcactgccatctcttcactcccctgtaaatttccttttctgatttttctaattctccttccccttttttctatttttttatttttagtttctttaac

SEQ ID NO: 10093 - DNA, 201 bp, Homo sapiens
gcaaccttactaacattaacatgtatatatctgtgtattgtattcctttgttttttctttcttatgagctatgtataaaacataagcttaatacaagtaayttgcagacaaagaaattatgagttcaacacaggagaaaaattcaaaatgatagtaggtcacccatgtagtgatgcctaatagaataaaaatgctgtgtct

SEQ ID NO: 10094 - DNA, 201 bp, Homo sapiens
aaattatcgcaaggacaaaaaaccaaacaccgcatgttctcactcataggtgggaattgaacaatgagaacacatggacacaggaaggggaacatcacacwctggggcctgttgtggggtggggggaggggggagggatagcattaggaaatacacctaatgttaaatgagaagttaatgggtgcagcacacaaacatggc

SEQ ID NO: 10095 - DNA, 201 bp, Homo sapiens
gtgcatagatagattcatgcacaatgagaatcctgatggagagatgccacagaaatatataatggaaaatcctataatagacacaaggaaaaaaatattasgaagagtatcctgctaactcctatttgtgtcacacgtgtgcccgttttcattacctaaaaaactctgataactgcagttttatttattatcattttttaa

SEQ ID NO: 10096 - DNA, 201 bp, Homo sapiens
aaaagccatcaaaagctcatgaggagcagaggagaggcagaatcagagctaagctttgaaattactcaaatggaagggagacaaagggaatcagggaaacmaaacaagttaagtgatgcccagcaatggcccagactgcaagagaagagggatccataggcaggggggtgaggaggcaaggaggagagcccttcccatgtg

SEQ ID NO: 10097 - DNA, 201 bp, Homo sapiens
tctcagcctccgaagtagctgggattacgggcatgcaccactacacctggctgatttttgtgtttttagcagagatggagtttcaccatgttcgccaggtygatatcaaactcctgacctcaagtgatccgcccgtctcggcctcccaaagtgctggcattacaggcatgagccaccacgcccggcctctgtatcttgaat

SEQ ID NO: 10098 - DNA, 201 bp, Homo sapiens
tagtttggggttaggagatagaaaacctgagtttaaaaaaaaacatgagttttattccttaccagcaatttggacaacaaactctctaaagaaaagaatgraaaaggatgtcctacgacatggtgcactgaaggggcatgggtacggaatccctgttctgtgatgagctgtgtggttcaggcaagttacttacatttctgg

SEQ ID NO: 10099 - DNA, 201 bp, Homo sapiens
cacctctgggggcagggcatagctgaataaaaggcagcagaaacgtttgcagactaaaatgtccctgtctggcagctctgaagagagcagtggttctcccrgcatggtgtttgagctctgagaatggacagactgcctcctcaagtgggtccctgacccccatgtagcctaactgggagacatctcctagtaggggctgac

SEQ ID NO: 10100 - DNA, 201 bp, Homo sapiens
aagactccatctcaaaaaaaaaaaaaaatgcttcttgttgatatggctgactactgaatagagaaaaagttactacatggctgctactggcctggactccrtgggacctgtccttttcaataaaccatgtgataaaacttaatgaaactagaaattgaatagatacagtctgttctgtgagcagacatttttaatattcaa

SEQ ID NO: 10101 - DNA, 201 bp, Homo sapiens
tcattcaacccttcttggcttcattatcctcacctgtgaaacacagagcacgacctaaggatttccaatgtctcggctaccaccaatgttctttgcttatrttatataagcacttttgcaatgcccccacagtactccactcagtcatggttggccaaaaaacatttgatccacaaattcttaattagggatgatgtgtgt

SEQ ID NO: 10102 - DNA, 201 bp, Homo sapiens
tgcagggccattctgaagacggaatgagctcatgcaagaagatgcccagtagagcacccaggcaggacaggcacagtgtaggtgctcaactcatgccaagrtctgtcactttatagctgctcatgcctagcacagagaatggcacagagggtccttttaaaatgtctgagaggaatgtgctatgatctcagtcgtctaata

SEQ ID NO: 10103 - DNA, 201 bp, Homo sapiens
ttctttccaattttctcttataaataatttgtcttaaatacatctaaacctaatgtaataaccacatgccatccttcagactatcgtttcagaaaatttcrcaggttggtttcatagattctgcagaaatctgaatctctctactgtaaactgaaactgaataataattcacaataaaaatgtatcttatcatcaaatgag

SEQ ID NO: 10104 - DNA, 201 bp, Homo sapiens
aatacattaaggtatgccaggatgctagagctaaaacctcatttttaaacccacagacaaggatggcttaaaatgacaaaacatatcttctgaaaatcttratcataaattgcttggctcctaactctgtaaaaaggagaaagaactgctttgagaaaaatacagtgtctcttccctgtggctcatttatccccttaatac

SEQ ID NO: 10105 - DNA, 201 bp, Homo sapiens
ctaggaccatgatggaaggggctgccatgaagacctctgacatgccctggagacattttccccattgtcttggcaattaacatttagctcctcattacttmtgcaaacttctgcagcaagcttgaaattctccccagaaaatgggtttttcttttctatcgcatcatcaggctgcaaattctccaaacttttatgctccac

SEQ ID NO: 10106 - DNA, 201 bp, Homo sapiens
taacagcccttgagtaaactgcataagcaatccgacccccatcagtaaatgtgcagggccattctgaagacggaatgagctcatgcaagaagatgcccagyagagcacccaggcaggacaggcacagtgtaggtgctcaactcatgccaaggtctgtcactttatagctgctcatgcctagcacagagaatggcacagagg

SEQ ID NO: 10107 - DNA, 201 bp, Homo sapiens
acagcatatacttggaaagaagttgtacgaaagactcaagcagtgaattgttaaaatggaggagctttaatctcctcttcagagaatgtatgaatttatamaactgtatagtttctgaagattttgaccattatgaaaaggtattcagaatcgatgggaaaaaacaactatgacaaatcagtttttctaaattatatattg

SEQ ID NO: 10108 - DNA, 201 bp, Homo sapiens
ttaccttgtatattttacgtaaataagatttttataaagagactcagtaataactgtgtcacccacttccacataaaatcaaacaattggcaataagatawgccagactgtacttactaaagattactggactgtaaatataaatcggaccaccatggaaagatatggctataaatgctgacagtatagcaagggaaaaat

SEQ ID NO: 10109 - DNA, 201 bp, Homo sapiens
agtgtccctttctttaaaaaaaaaaaaaaatctgatttggacaataaattgcatagtcattcatctttttcctctacctggagtattcctcattcttcackccattacatttctgtgtcaagccttgcatggcaactccaggtagtgatagtcattctctcctctcagatgttatatcattttaatcaaatatctttcaga

SEQ ID NO: 10110 - DNA, 201 bp, Homo sapiens
tcctgagagtagaattccctgcacttcctttcctggttggaatttatgcacttatgcctcatcgcaaaccacagaaaagatacacctgtgtcacgctgctycttccccgaccgatcttgtgatttgatacacatcattccttaaaaggaagggacatctgagagggcaccccttttacttacttctcaatgctgccggtca

SEQ ID NO: 10111 - DNA, 201 bp, Homo sapiens
ggcaagccatgggattgtacctcaccaagagggtttcagtacttcagtgccttaccccaggctctgctttccagagaacctaggttaagccaccaatcacrcagacagaacaagtgcttaagatgcctaaagatgccacaactactttacatgaaaagatcctgattggtattgagtttaaaattatgctggcagattatc

SEQ ID NO: 10112 - DNA, 201 bp, Homo sapiens
tcagcacttccaatttcagcatgatctgttgtcaggggtacagagatcaaaggataaaaggaatgaaacaagggcacagcgatataatgaattctgacaayttgctctttgcttctgattttagcatatagtaggtgttctacaatacaggtgggataaatggttgctatccaaaatgccctttaatatctttccacttat

SEQ ID NO: 10113 - DNA, 201 bp, Homo sapiens
tgccctccagggaggaaatttcagagtaaataacaggcacaaatggtattgctgctgggaagaaaatgcatcaagagcacaaagagcatcactgattaaamaatgcttcttggctgggcatggtggctcacgcctgaaatcccaccactttgggaggccaagatgtgcggatcacctgaggtcagaagtttgagaccagcc

SEQ ID NO: 10114 - DNA, 201 bp, Homo sapiens
cacctgaagtttttcttttaacagaacaatattaattctttcaatccatgagcatggaatatctttcctttttttggtatgtgcctcttcaatttctttcrtcagcatttttttatgtgtttcttttttttattattatactttaagttctggggtacatgtgcagaacatggagttttgttacataggtatacatgtgcc

SEQ ID NO: 10115 - DNA, 201 bp, Homo sapiens
tataaacaccctgcaataatagcttgaccagtatcatgaggtagctacttttatcccattttacagatgagaaaatagattgagaggggttaagtaatccrtacaaagtcatttcacaaacaagtgactgagattggaataaaatctacatgccactcaagtctttgtttttaaccaagactttggaaatctgtgcttttt

SEQ ID NO: 10116 - DNA, 201 bp, Homo sapiens
tttctcagggcaaaaattctggagacatacttgactcctctcttctcatatccctaatctagtccatcaataaacccctgctggctccatcttcagaatayattcagagcctattcttcccaccatctgccctgctattgctttggtaaaagccgccatcatctcttgcctgaatgatgtattagcctggccacttctatc

SEQ ID NO: 10117 - DNA, 201 bp, Homo sapiens
cctatctgtaatcttaaaatatctactattcctgaaggaataagggtaatacttgaccaaaggacttgaaactctgtttcaattacagaatatcagggtgytagccctctctcttatctaactctaaaagccttatcatcattcgcattcctatcaagtagctagaattagaatcctcttaaatcttatctaaaatattat

SEQ ID NO: 10118 - DNA, 201 bp, Homo sapiens
aacagcagcttcaattgaacatgggtctaggtgcagcaatactggtcacaatggacaacctcacagtcacttattcatttacaggtgaaactgctcccaastaagagaggtccactcataaacatgatattttttgcacatttaaggactgaagcctttattaagcttcaggactttttattctaatgattaaccatggtg

SEQ ID NO: 10119 - DNA, 201 bp, Homo sapiens
cagacaaacatccacaagcaccaagaccatccaggaaaacatgacctcacctaatgaactaaattaggcaccaaggaccaatcctggagaaacagagataygtgacctttcagacagagaatttaaaatagctgttttgaggaaattcaaagaaattcaagataacacaaagaaggaattcagaattctatcagataaatt

SEQ ID NO: 10120 - DNA, 201 bp, Homo sapiens
cttactcttgtcacctaggctggagtgcaatggtgcgatcttggctcactgcaacctccgcctcccgggttcaagcgattctcctgcctcggcctcccgartagctgggattacaggcgcccaccatcatgcctggctaatttttgtacttttagtagagacagggtttctctatgttggccaggctggtctcaaactcct

SEQ ID NO: 10121 - DNA, 201 bp, Homo sapiens
ctctgggtatatattgtcttagacaccacagtggttcatatcactttggacgtattacttctgatctagcatgacactaccacagaggtcaactgaagttmcacacagctaccatagggagagcaaaacacaggattccatgcaaagattgtagcaaaatattctctgggattcacagaacacatattatgattaaagttc

SEQ ID NO: 10122 - DNA, 201 bp, Homo sapiens
gcaaatttaacattctgttctgttatacatgtacattttattggaaaaaatgtttccctaaaatatttaaggtcaaagcttcaggagaaaatgccatgtayttggcagacccctggcaaacagctattcccagggatgtaaggaatccagtttcagaagcatagccctgagctatcttatcatcttctttaaagatagaaa

SEQ ID NO: 10123 - DNA, 201 bp, Homo sapiens
catttagctcctcattacttatgcaaacttctgcagcaagcttgaaattctccccagaaaatgggtttttcttttctatcgcatcatcaggctgcaaattytccaaacttttatgctccacttctcttttaaacataagttccaatttcaaatcatctctctcaagttcaaagttccacagatctctagggtggggcacaa

SEQ ID NO: 10124 - DNA, 201 bp, Homo sapiens
gatgacacgattgtatatttagaaaaccccatcacctcagcccaaaatctccttaagatgataagcaacttcagcaaagtctcaggatacaaaatcaatgygcaaaaatcacaagcattcctatacaccaattacagacagagagccaaatcatgagtgaactcccattcacaattgctacaaagagaataaaatacctag

SEQ ID NO: 10125 - DNA, 201 bp, Homo sapiens
gtatgtctatacttacctacaacattctaggtttatcttttccaaaagttcatactctttttcaagggatgagttctgaatattcaggaatcaattatacrgtgtgtttatgacgtgtggtcagtgcctatttcactccctgtaaccccaccaagcaatagtgaaatgttcttgttattgtgaagctagcaaaggtctagg

SEQ ID NO: 10126 - DNA, 201 bp, Homo sapiens
taattgtattatatttctgtagcccaaattttttattacgaaccatgctttataagcaggccaaaatattatttttaaaagaatgatctgttcaggatagwgattgcgtcctttttcgtttggctgtgacaaggatagcacactgtttacactcagcgctgaacaataaatcagcctgaggatttcctttcctcacacgca

SEQ ID NO: 10127 - DNA, 201 bp, Homo sapiens
tggtgcgatcttggctcactgcaacctccgcctcccgggttcaagcgattctcctgcctcggcctcccgagtagctgggattacaggcgcccaccatcatrcctggctaatttttgtacttttagtagagacagggtttctctatgttggccaggctggtctcaaactcctgacctcaggtgatccgcccacaagagtcta

SEQ ID NO: 10128 - DNA, 201 bp, Homo sapiens
gcatactgtctggcagataccagtacaaaaaaagaacagccaaaagagaaaaggagatggactataaattatcgtcggaaaaaaaaatcactttctatagrgaggtcatttggatcacaagaaaatccacaagcttcatccttgtctaggtagcaggttgataggtgcagcaaaccatacgtggcacatgtaacaaacctg

SEQ ID NO: 10129 - DNA, 201 bp, Homo sapiens
cagatctctagggtggggcacaatgccaccagtctctttactaaaacacagcaagagtgacctttactccaattcccaacaagttcctcatctccatttgrgaccacctcagcccgaacttcattgtccacaccattatcagcactttggtcaaaaccattcaacaagtctctaggaagttccaaactttcccacatcttc

SEQ ID NO: 10130 - DNA, 201 bp, Homo sapiens
tgcactccagcctgggcaacagagtgagacactgtctcaaaaataaataaataaataaataaataaataaataaataaataaataaataaaagttccatcygttaatattgctaaaaaaaaaaaaaaaggagtttgagaccagcctgaccaacatggagaaaccccgtgtctactaaaaatacaaaattagccaggtgtgg

SEQ ID NO: 10131 - DNA, 201 bp, Homo sapiens
cagatgacacgattgtatatttagaaaaccccatcacctcagcccaaaatctccttaagatgataagcaacttcagcaaagtctcaggatacaaaatcaakgtgcaaaaatcacaagcattcctatacaccaattacagacagagagccaaatcatgagtgaactcccattcacaattgctacaaagagaataaaatacct

SEQ ID NO: 10132 - DNA, 201 bp, Homo sapiens
caaatggtattgctgctgggaagaaaatgcatcaagagcacaaagagcatcactgattaaacaatgcttcttggctgggcatggtggctcacgcctgaaaycccaccactttgggaggccaagatgtgcggatcacctgaggtcagaagtttgagaccagcctggccaacatggcaaaaccctgtctctactaaaaataca

SEQ ID NO: 10133 - DNA, 201 bp, Homo sapiens
ttaatgtattatcatacttttccttaatgttcaagattataagtaaattacagttattagtttccaaaaagtcacctttttgttttctttatcggttgtargattattggctatcttgtactgctgaagatctattatttccttcatttcatagttatcaccttttctcttacatacgatcactgccaaatcaaataagaa

SEQ ID NO: 10134 - DNA, 201 bp, Homo sapiens
acacactccaaaagcttcagggagcaaaatgaggatacaatgcttcctgctctcaaaaaaccaacagtctattaggaaagaccataacaatgaagggtacygagggaaaacacagactagtatgacaagcaacatctgaagcccaggggagacagcaaggccagttgcaccccttcgtgggcagagggagctagaggggtt

SEQ ID NO: 10135 - DNA, 201 bp, Homo sapiens
ctacagtcaacaatttgctgtaaataattcttgttttctcattatgcaattttgtgtggccatatataaacccattttacatttaaaaattgcacccttayggacacacacagaagaaacatctcttaaagggaaataaatgcatgatacacccgtaaattattccaaaaccacatatacctgttctgaatgtctttagta

SEQ ID NO: 10136 - DNA, 201 bp, Homo sapiens
aaaacaatgacaataacccatactctaaatggtgcttaccatctaacagaagaaatttacttgaggtaatttatgacacataaagcttccaattcaggagkccagggatggtggatcacctgaagtcaggagttcaagaccagcctgaccaacatggcgaaaacccacctctactaaagatacaaaaaattagccaggcgt

SEQ ID NO: 10137 - DNA, 201 bp, Homo sapiens
ggggacacctacgatagagagataacagcagtttctatctttcacctttatattcattggcataagcagatcatatgaattttgtgaaggcatataattaygaattccatataaatggatactaccggtctaagagaagacatgagaatgtctttctagcaagatgagatttcaagatgtgaaaatagaaaacagtgaaat

SEQ ID NO: 10138 - DNA, 201 bp, Homo sapiens
tctgttaatattgctaaaaaaaaaaaaaaaggagtttgagaccagcctgaccaacatggagaaaccccgtgtctactaaaaatacaaaattagccaggtgkggtggcgcatgcctataatcccagctactcgagaggctgaggtaggaaaatcacttgaacccaggaggcagaggatgcagtgagctgagatcgcaccatt

SEQ ID NO: 10139 - DNA, 201 bp, Homo sapiens
atgcctttcttagatgcccaggagcccaataactctgaaaatttgtccatcagcatcacatgcacaggacttttctacattgaaatttctaatcccattckccacagatcaaaacaatgtgtagtataatctgtttcatataccttgcaatttatcactgctttgcatcaacattataatgctgacttgaaaatataagtc

SEQ ID NO: 10140 - DNA, 201 bp, Homo sapiens
atacaaaaattacctgggtgtggtgttgcgtgcctataatcacagctactcaggaggctgaggcaggagaatcacttgaacccaggaggtggaggttgcastgagctgagatcgcgccactgtactctaggctgggcgacagagcaagactccatctcaaaaaaaaaaaaaaatgcttcttgttgatatggctgactactg

SEQ ID NO: 10141 - DNA, 201 bp, Homo sapiens
ttcatatttcaagacctcagtttcatcaactgtattaatgggtataatatggagaagataggagagttaaattgtatctaatatgtcataagtggtcttawaaaagcatcagttactgcagtgttataatcagcatctaatccagtggttttcaacccatgctctttcaagcccattcagaggaaacccaccagtccccca

SEQ ID NO: 10142 - DNA, 201 bp, Homo sapiens
agttaaaaacatacaatgcttcttctagttatggaaacacatatatggaagttttataaggatttggtttaaagctcagtttcagcgtttattacttacaygaatttggacacctgtcacaactctcagtgtagcttcctcatctgtaaaatgggcataatacctctcacagctttgttgtgaaattaaaaataaagcatg

SEQ ID NO: 10143 - DNA, 201 bp, Homo sapiens
acactctaaaatatctcttactaaaatgttcataaagttggaaacaccataaatggtgtatgattatttccttaatgtacagcacacttaacaaatactayagaaataactgcaaaaacaataaaaaggtatttggcaaagtaagtaaagaccttcaaatattttttccaacattaacatcttactgcttgactttttaac

SEQ ID NO: 10144 - DNA, 201 bp, Homo sapiens
cacaaccacgcccagctaattttttgtatttttagtagagatggggtttcactatgttccaggctggtcttgaactcctgacctcatgatccgcccacttyggcctcccaaagtgcagggattacaggcacgagtcaacacgcccagctgagtctgatcatttgacaagaacctgaagactgagctgggaaacacccaaag

SEQ ID NO: 10145 - DNA, 201 bp, Homo sapiens
ttgctacaaagagaataaaatacctaggaatccaacttacaagggatgtgaaggatgtcttcaaggagaactacaaaccactgctcaacgaaataaaagargacacaaacaaatggaagaacattccatgctcatggataggaagaatcaatatcgtaaaaatggccatactgcccaaggtaatttatagattcaatgcca

SEQ ID NO: 10146 - DNA, 201 bp, Homo sapiens
ttattccattaaattatatactttacatcctgttaaagacatgagggaaaagttttgatagattgatgttcctacaaataactgaaagaaaaatatttatytgctatctaaaaataactttttcagagtaattcatgtgttgccttttattttagaaacttttcactgagtaacatctttaaaatttttcattcagtggtt

SEQ ID NO: 10147 - DNA, 201 bp, Homo sapiens
aagataaaagaaaaaagatacactgaagggttttcataaaagggaaattgtgtgatatataaccaatgtcttcaacgacatccttataaatacaactgtgkgccttccctttctgtcctttcttgatttgagccaaggacttagtaccaaagtattactcagtaaaaccaattctatgaggggcctttcaggacatatttc

SEQ ID NO: 10148 - DNA, 201 bp, Homo sapiens
ctcttctcttccagaatcattcacatgctttgtgtcctggctagaatactgtttcagatgaaaaataaatctcaaatatagacactaaaatctaacatatmcagacaccaaatttcttagatattcactggccaactgcattttatttaactgtattatataataagaggaacatgttaaatgtataactaaatatgatta

SEQ ID NO: 10149 - DNA, 201 bp, Homo sapiens
acctggtggcaggttgattatattggacctcttccatcatggaaaaggcagaagtttgtcctcactggaatagacaattactccagatatgggtttgcctrttttgtatgcaatgcttctgccaagactaccatccgtggactcacagaatgccttatccacaatcatgctattccacacagcattgcctctgtccaaggc

SEQ ID NO: 10150 - DNA, 201 bp, Homo sapiens
caacaatgtggtcaattttggaataagtgtgatgtggtgctgagaagaagatatattctgttgatttgtggtggagagttctgtagatgtctattaggtcrgcttagtgcattgctgagttcaagtcctggatatccttattaatcttctgtctcgttcatctgtctaatattgacaatggggtgttaaagtttcccatta

SEQ ID NO: 10151 - DNA, 201 bp, Homo sapiens
aatagggaatcctttatatttttaagacctggaggctaagcatttttatgttaagatatttttgaaaataccatctttcagaaaaaaaaaagtataaaagkcctgacttgttacttcaaaactatacataggaaatgcgaatggagattagataaattcatcaaagaaattcaccttactaaatatattaatggccacaga

SEQ ID NO: 10152 - DNA, 201 bp, Homo sapiens
gtccctaaaattagaaataagtttccccatcagaatgaggatgaacatttcattcactcacttactcattgcagttacagaaatgagtaagaaaccatccrtgacctgaataagttcacagcaaggtaggcagaggcaaagggacaatagggtgcagtggtgtgcaccatgacaaaggggaagtgctagggaggcacacag

SEQ ID NO: 10153 - DNA, 201 bp, Homo sapiens
acaagtggacaaattaagcatgccacacctcacaataaagtctagtttgggaaaaaatgacagcctctataacagcaagcactgaagtaaacaaatcacaytttcttagaaaatttaggcttaaaaaagaaatgtttaaataatatcattaacaaaagtttaaagggagacaaagctttacaagttttggcttacaggaaa

SEQ ID NO: 10154 - DNA, 201 bp, Homo sapiens
tacataaatattctgtcaaactggtctactcccctacctgcaaatgctttgacctttcctaccccaatgcctctgcccaaataaaatcctctgctttccakcaaaataaaatagcctctcacaaaatatctgcctatccaaatctgtcacctttcaaagctcagcttaaaagtcacttcctacttgaatttcttcctgctt

SEQ ID NO: 10155 - DNA, 201 bp, Homo sapiens
ttatttcctattacgaaaagagtatttccaagcttctaaaagctggaaaatacaaagaagcataaattagaaaataaaagttacctgcaaccttactaacmttaacatgtatatatctgtgtattgtattcctttgttttttctttcttatgagctatgtataaaacataagcttaatacaagtaacttgcagacaaagaa

SEQ ID NO: 10156 - DNA, 201 bp, Homo sapiens
ttcttctgagccctccacgctcttctaattgatactgcttgctctactaagcctgttgaattactgtagtcctgggacttctctttgctcccctttcctgrcttctatatctccctcttccttgatttactagctcatccttcagctttttctaaacatacacaggatgtaacactctaaagtcccacatctatgaaaata

SEQ ID NO: 10157 - DNA, 201 bp, Homo sapiens
ttgagccagcacacctagccccttgagacatttcttgattagaaaacatgctttaggatctatttatctaaaagagtacattccttgtatttaaactctgmataaaaacatggaataattctcgatgactgatttagtgcttagctgataatagtcctaaaatacttgtaaactgtttaacattatactacttatttaaat

SEQ ID NO: 10158 - DNA, 201 bp, Homo sapiens
gagatgagcggactacctgaggtcaagctcgagaccagcctggccaacatggtgaaaccccatctctactaaaaatacaaaaattggccaggcgtggtggygggcacctgtaatcccagctattcaagaggctgaggcgggagaatcgcttgaacctgggaggcagaggttgcagtgaatcgagatcgcgccattacactc

SEQ ID NO: 10159 - DNA, 201 bp, Homo sapiens
tacctactctgtcatctcttccccaaggagcagatcccagattgaatcccatgcacacctttccatacccttggtgatacatgaagtagtagtgctttagyagtattcactcctagtagtatatgtaattattgttcaacatggtcttctctattaatagactgtgagttccttggcataagggataatctctcagtcatt

SEQ ID NO: 10160 - DNA, 201 bp, Homo sapiens
gacctgactgttagagggaaaactaacaaacagaaaggaatagcatcaacatcaacaaaaaggacatccacaccaaaaccccatttgtaggtcaccatcaycaaagaccaaaggtagataaaaaccacaaagatgaggagacaccagagcagtaaagctgaaaattctaaaaaccagagggcctcttctcctccaaaggat

SEQ ID NO: 10161 - DNA, 201 bp, Homo sapiens
aatgggaacttcatcatccagtttctcagggcaaaaattctggagacatacttgactcctctcttctcatatccctaatctagtccatcaataaacccctsctggctccatcttcagaatatattcagagcctattcttcccaccatctgccctgctattgctttggtaaaagccgccatcatctcttgcctgaatgatgt

SEQ ID NO: 10162 - DNA, 201 bp, Homo sapiens
taacaggcacaaatggtattgctgctgggaagaaaatgcatcaagagcacaaagagcatcactgattaaacaatgcttcttggctgggcatggtggctcaygcctgaaatcccaccactttgggaggccaagatgtgcggatcacctgaggtcagaagtttgagaccagcctggccaacatggcaaaaccctgtctctact

SEQ ID NO: 10163 - DNA, 201 bp, Homo sapiens
ccatactattctattttgtgtgcttggaattttcactatcaaaagttttaaaaagtttgatataacagtgaaaatctaatgagaaatacatgatttttttygcaactagaaaatcatagcaaaaaatcataaagataaaataattatgaagatcaagcattaacatttacattaagcttagcgaggaaggcatgtcaaaag

SEQ ID NO: 10164 - DNA, 201 bp, Homo sapiens
atttttagtacctctgaatcattttgtttcaggtgtgtctcttataaacagtgtatagttgggcctttgtgagccaaactggaaattgtttcggtacttcyacccatctggtgaacttctgtggcagtagtttcactttaatctttggcatctcttttctctcccatgcagctttttaaactgttcttgttcacagcaaag

SEQ ID NO: 10165 - DNA, 201 bp, Homo sapiens
aaattctggagacatacttgactcctctcttctcatatccctaatctagtccatcaataaacccctgctggctccatcttcagaatatattcagagcctaytcttcccaccatctgccctgctattgctttggtaaaagccgccatcatctcttgcctgaatgatgtattagcctggccacttctatccttgctgctctcc

SEQ ID NO: 10166 - DNA, 201 bp, Homo sapiens
tgcctatcatgtgacagtcattttcaaacactgagaatacaacagtgaatttttctggaaccaacaatcatggttctccagttaatttgaactatcttgckttacttcaatttttccattaaaatgcattgttcattctcttatcactgaacgggggtggggaggtctcaaagttctgttttaaacagcaacacatctccc

SEQ ID NO: 10167 - DNA, 201 bp, Homo sapiens
ctccccctctggccaactcttgataccaccacaggcttcctctaccccttctggttttccttagtatgccctccagggaggaaatttcagagtaaataacrggcacaaatggtattgctgctgggaagaaaatgcatcaagagcacaaagagcatcactgattaaacaatgcttcttggctgggcatggtggctcacgcct

SEQ ID NO: 10168 - DNA, 201 bp, Homo sapiens
ggatccacactatatagccttcttaccatacaggaaaaactctctcctccaaagggctgttgtaatattttgccacacaataagaatgccacaactcatcragtctttttttttcccacttgtcttggttgtcagaaaacttacagagtaaaatttcaaatttacaacaaaaatatgatactgtgctatgaaagatcacgc

SEQ ID NO: 10169 - DNA, 201 bp, Homo sapiens
ctacagtcatccttgactcctctctttttttcacatcctttacttaattcatcatccaatccggttggttctatgtttaaaatttactcagaatctgaccrcctataccaccatttttgtcatctcgattaacacaattttcttctaattcttctcttagttaccactcttgcctcagaagagccagaatgagaggttaaa

SEQ ID NO: 10170 - DNA, 201 bp, Homo sapiens
tggatcacctgaggtcaggagttcaagaccagcctggccaacatggtgaaaccccgtctctactaaaaatacaaaaattagccagatgtggtggtgtatgyctgtaatcccagctacttgggaggttgaggcaggagaatcgcttgaacccgggaggcagaggttgcagtgtgcggagaccgcgccattgcagtccagcct

SEQ ID NO: 10171 - DNA, 201 bp, Homo sapiens
tgaaacaaatactgccttacagaaaaactttactgatgtatctaatcaaaaataagatgtcagggtattaaatatcctgtgttcagagttgagtttctctstgtgtgtgtgtgtgtgtgtgtgtgtgtgcgtgcgtgcgcgcgcgcgcgcgcacacgcgcgcgtgtttaatattcgatggcaggagaggagctaactttct

SEQ ID NO: 10172 - DNA, 201 bp, Homo sapiens
attaagatgaggaggatttgtaaaataaagggagacacatatgtacaaaaggaaataagaacaacgggaggagctactctgaactcaaaaggcagagccayagaatatttttcttcctacttctgaaaatccttggggaagttaggcttagtttgtcatattttaccaaaaaaaacaaaacaaaactgactatttcaatat

SEQ ID NO: 10173 - DNA, 201 bp, Homo sapiens
catactgaaaactctcaataaactaggtactgatggaacgtatctcaaaataataagaggtatttatgacaaacccacagccaatatcatactgaatgggmaaaaactggaagcattccctttgaaaactggcacaagacagggatgccctctctcaccactcctattcaacatagtgttgaaagttctggccagggcaat

SEQ ID NO: 10174 - DNA, 201 bp, Homo sapiens
aataggaggaaccaataaaaccaaaagatggttctttgaaaagatcaataaaactgataaacttccagctaagcaaaccaagaaaaaagaaagatgacacwaattgctaatatcagaaataaaggagagatcattactactaattccatggacactgaaacgataacaagggaatacaatgaacaacactatgcccacaaa

SEQ ID NO: 10175 - DNA, 201 bp, Homo sapiens
cctgaagtggcccagtctaccacacagctagaatttctttatcatatgtaaattctgctttctattctatcaggcagtcatgtttgctttaacacaaaagktgctataaattgtttacaacagatctcagcccctctcacctccactgccaaagcctcccatgaagtctgttgcccacccaaatgcttaatgagagaagct

SEQ ID NO: 10176 - DNA, 201 bp, Homo sapiens
tttatcttgtagttccaataatccccacgtgtcgtgagagggaccaggtggagataactgaatcgtggggatggtttcccccatcctgttctcatgatackgagttatttctcatgggatctgatggttttataaggggctgcccccttcactgggcactcattcttctccttcctgctgccatgtgagaaaggacgtgtt

SEQ ID NO: 10177 - DNA, 201 bp, Homo sapiens
gcctaaacatacatgaatactcataccgttgggaatttgggacacatttttgttacctggcttaaaatagcaaaactgctctcctaggaactgagtaatgmtgaatggctaagttttggatagctgtggatttactcctttaagcatcagatctttgattttataattttcattaatcatttttcaatgctttttcaattc

SEQ ID NO: 10178 - DNA, 201 bp, Homo sapiens
ctgcaaattctccaaacttttatgctccacttctcttttaaacataagttccaatttcaaatcatctctctcaagttcaaagttccacagatctctagggyggggcacaatgccaccagtctctttactaaaacacagcaagagtgacctttactccaattcccaacaagttcctcatctccatttgggaccacctcagcc

SEQ ID NO: 10179 - DNA, 201 bp, Homo sapiens
aggggtgaaataaatgctgaatgaatgaaagaatgaactctatttctgaatgaacaaaacgcagttttttgtttgtttgtttgttatgagacagagtctcmctctgtcacccaggctggagtgcagtggcacaatctcagctcactgcaacctccctcttccaggttcaagcaaatctcctgcctcagcctctcgagtagc

SEQ ID NO: 10180 - DNA, 201 bp, Homo sapiens
tgaagatcttcttaaccactaaaagtgacatcaagccaataactcatgcccttccacaggcacacccccagccccaaccccagcatgtgccgcccacccartacagctatcaccagtaggctcttctcttccagaatcattcacatgctttgtgtcctggctagaatactgtttcagatgaaaaataaatctcaaatatag

SEQ ID NO: 10181 - DNA, 201 bp, Homo sapiens
cattacaaaaaatagactgtgaatggatttcaggtggaaaatggaaaaggcatagatcctttctcctgggtctgacaggtgggaaaattaaaaaaatatawacacacacacaaaaaccaaaaaagccacagtgaatcaagaacatggacagagagagaaatatgagaatgtaggtgggccttgagcacctcagaccctaaa

SEQ ID NO: 10182 - DNA, 201 bp, Homo sapiens
tactaaactaggacaagatttttcatgattaaaagatgggatgttgttagtctgtaatgaattctcagaaggattatatgagataaatgagataatatacracaaatacctagcatactgtctggcagataccagtacaaaaaaagaacagccaaaagagaaaaggagatggactataaattatcgtcggaaaaaaaaatc

SEQ ID NO: 10183 - DNA, 201 bp, Homo sapiens
ctaaacttcaactcttgacttttgtgcatccacaggtccaacaccacatggaagctgcaaaggcctggggcttgcaccctctgaagcaaaggcctgagctrtaagttggccccttttcgccatggctggagcagctgggaacacagggcaccaaatccttaagctgcacacagcagtggggcccttgatccagtccacaaa

SEQ ID NO: 10184 - DNA, 201 bp, Homo sapiens
caccttgccattttgttttaaagaacaaatatttgcctacgctttaagttattggcaaatattatttcgtttcaaagtcatttttatttaacataatgtgraaactgaggttttacatattccccagtatgttcaaaatgtctgtcttttctattcataattttcgtattttcctgaaaactgaacaaactgaaattcact

SEQ ID NO: 10185 - DNA, 201 bp, Homo sapiens
gctcctcattacttatgcaaacttctgcagcaagcttgaaattctccccagaaaatgggtttttcttttctatcgcatcatcaggctgcaaattctccaamcttttatgctccacttctcttttaaacataagttccaatttcaaatcatctctctcaagttcaaagttccacagatctctagggtggggcacaatgccac

SEQ ID NO: 10186 - DNA, 201 bp, Homo sapiens
gttccagtttcaggtcatagcatgttgaaccctgcaatgctcagaaagggagattcctttctttgcagacctttcccacagagtcattacttttcgagtaycagtggcaacagtgagcactgctttcaaggtgccaaacttaaagacttcttttctgctacacagttatataattgttattttcatcttaattatccaagt

SEQ ID NO: 10187 - DNA, 201 bp, Homo sapiens
gagctggcagtgagccgagattgcgtgcactctagcctaagcgacagagccagactccgtctcaaaaaaaaaaaaaaactcttgataaaattagaaaatgycactaaataataagctatgaaatgcatattacaaataattaagtatcaaatagaaaaatcagtaagtaagtctggaaaggcatggggacttcatggaaaa

SEQ ID NO: 10188 - DNA, 201 bp, Homo sapiens
ataagaggtacaagagaatcaggagaatatggtgtggtgagagtaaagggaagagagagttttaggagaaggggatgatcagtaacatcaattgctacagrggattcgagaaaaataataaaaacaatccactgtatttgaaaattagaaaatatgtggtgatctatactagatcaaccccatttgtattgcaaacatggt

SEQ ID NO: 10189 - DNA, 201 bp, Homo sapiens
aggcattatcctataagcttttgtcatctacaatttttcaatgtaaaatatttgaaatgtaggtgaatattaactttaggaatagtactggtattgctttrtcctttgatacttcaatatttttcccccaaccatcaatctgaaaactactaactctctccctgaccttccttcctttttccctcactttatccttagtct

SEQ ID NO: 10190 - DNA, 201 bp, Homo sapiens
gttcattgtagagcaagaaatgcaaaagtcaatttaatgcccttcaaatatacaagccctacaggtaaacctaaagcaatctaaggcaggtttgagatgaycattttggaaaataatgggatttttacaaagatccatagaacatctttcatggagtcactgaagtttctagaggaagcccaagagctccctgctatgcct

SEQ ID NO: 10191 - DNA, 201 bp, Homo sapiens
gtggtgtcctccagaggaagccaagggaacccagagggaaaagagcctgccctagatcatccagctaattagcagcagatccaaaatttgaactctagagmctataacctttttgctataaaatgccacccactggtgatcacagagaaaatggagacttagagatcactgagtttatcagcaatggagtcatgtggaatg

SEQ ID NO: 10192 - DNA, 201 bp, Homo sapiens
aaagtcacagaactggctactggcactcatgaataacgaacaatgttcttactcttaagggaaaaaaatataagagttaatgtcttatttctcaaaaatawagttcttggagaatgccagagtgacctgaagcaaggtgatatctgcaatttggaaattggtgtgtgggctttcaggactgtgatggccattaactatggc

SEQ ID NO: 10193 - DNA, 201 bp, Homo sapiens
tatgaaggcatctttgctagccctgaaatcaacctttacaaaggagtattcctggacaaaaagttacttcatttcttcttttcctccctattggaaacacrtaacgtttcagaagaaagatcgcccaagagcgctggtttgggaagaggttctataaaagtgccatttggctggcccagtcttagaacccaggttagggga

SEQ ID NO: 10194 - DNA, 201 bp, Homo sapiens
acatgatctcattcctctttatgtcggcatggtattctatgatatatgtaccacattttctttatccagtctatcactgatgggcatttgggctgattccrtgcttttgccattgtgaatagtgctgcagtgaacatacgcatgcatgtatctttatagtagaatgatttctattcctctgggtatatgcctagtaatggg

SEQ ID NO: 10195 - DNA, 201 bp, Homo sapiens
aactggtgaattaggttttgaaagcagatcagaagtcttacttggctgcctctgcttttcccagaacagataagcaataaacataaggcttactttgatcygtatcttagctgggtggctctttagtttcctgaaacctgaccccttcaagaatctccttaggtctttcaactattctttctccataaaattccttttttt

SEQ ID NO: 10196 - DNA, 201 bp, Homo sapiens
ttttctgtaaccacttgatattgctatcccagggtcaccaacactagcctagtgagatgatgaatattttatacaaactagaagaaagtacccctccaggrcagatgtaaaccctggtgagatcccacagtgagaagacagcagttgcatttcaacctctactagcagaaatctttactcagtgtacaaaatgcaagacca

SEQ ID NO: 10197 - DNA, 201 bp, Homo sapiens
accttgtatgggaggagggagtgtgtagacatgtatttggaattcatgcctcaatgctaaaactaaatcatagtttttaaaaacaatgtatggttgtgtayagcagaaactaactctttaaaataataacagcagcatcaaaactcagcttagaaggaaatctcacagacaatagtgatgaattattttaggaatgctgca

SEQ ID NO: 10198 - DNA, 201 bp, Homo sapiens
ggtgggggaacttaaacaggatggttagagaaggtctcacagagaagaggatggtggagcagagatctgaggtgcaaaaggagcaagccatggagaaccgyagcacacaacagcccagactaaagaagtgttccataccaaggccctgacatagaggcctctgagcgtgtctgagaaaggggtcagtgcagcaaggcagag

SEQ ID NO: 10199 - DNA, 201 bp, Homo sapiens
aaaagctttaaaatacctatcaagtaatttacaatttgtacagggaaaaaattttacaggagttcaataaataaatgcaaattatacaaagatgtcacaamacatgattccctgtaaaataaatactgataaataacataagttctgggatggttggagtgtctcttttttgatcaccagtgtattcaagtacctataact

SEQ ID NO: 10200 - DNA, 201 bp, Homo sapiens
gggcttctcacctgagttatccttactaaaggaaaaaattacagtcttttccctttacaattttttttttttttttttgagacagagtctcactctgtcasccaggctggagtgcagcagatctcgactcacttcaacatccgcctcccgggttcaagctattctccagcctcagcctcctgagtagctgggactacaggc

SEQ ID NO: 10201 - DNA, 201 bp, Homo sapiens
taagctgatttccaaagaataggaatagtggaggttaactatgcacctactcaatactagatggaaacagctgtggttcaagtcatatatacaggactatytttaatgtactcaatggcattcaattccgtatggtgaataatgtatagtgctcagaagcccaagtaacaattggtctagaactgttaaatcacgttgcaa

SEQ ID NO: 10202 - DNA, 201 bp, Homo sapiens
aaagctagaggaaatatataaactcctagaataacacaacctccaagattgaaccagaaagaaattgaaaacctgaacagatcagtaacacattctgaaawtgaatcagtaataagaaacctaccaacaaaaaaaaacaggtggattcacagccaaattcttcctgatgtacaaagaaaaactggtaccagtcctgctgaa

SEQ ID NO: 10203 - DNA, 201 bp, Homo sapiens
ccataaacacaactggaggcagataaattttgaatgtgttatatagcagggtattaacccactctgaaaatgatttaaatcatttttaaatctacagaatmattaagacagataaataaaacataaatcaagtcatttaaaggtatgctcagtattttcattctattttaaagaaaaaatgttctatgggaaaatgggcca

SEQ ID NO: 10204 - DNA, 201 bp, Homo sapiens
cttttggagactctaaaccctaccccttttactcccactgcacactgcccctcaaaaccacaattaatgtttaaattatttgtggcaagatattgccacaktgaattattgctgttcgataggaatgtggtccttcgtcacccttttgagatgcattcacttaaaattagaaaataggccgggcgcggtggctcacgcctg

SEQ ID NO: 10205 - DNA, 201 bp, Homo sapiens
aggtgggtggatcacctgaggtcaggagttcgagaccagcctggcaaacatggtgaaaccccgtctctactaaaaaaatacaaaaattagctgggcgtgayggtgggtgcctgtaatcccagctactcaggaggcagaggcaggagaattgcctggacctgggaggtggaggctgcagtgagcacagatcgcaccattgca

SEQ ID NO: 10206 - DNA, 201 bp, Homo sapiens
actgtctccaaagagattaaagaatggggcatataaagatggaacaacaaaaattcaagtgataaattctattggggtggcaattaaagaataacaacaakaatttttatttctattatattttacaactctgtaaactgtttctgactttccgacagaagtaagaggtaagtttatttaacagcccttgagtaaactgca

SEQ ID NO: 10207 - DNA, 201 bp, Homo sapiens
gaagataacaaaggagaatgtctttgtaactttggggtaggcaaagatttgttagatgtaatacctttagcatgatccatataaagaacaaattaacaaaytggactacatcaaaggtaaaaacttctgttctatgtataacattatcaagagaataaaaaaaaagccacagattaggagaagcatatggaaataaaatat

SEQ ID NO: 10208 - DNA, 201 bp, Homo sapiens
aaagtggaactcaggattaagaaactcacacagaactgcacaactacatggaaactgaacaacctgctcctgaatgactactgggtaaattaaaaactgarggcagaaataaacatgttctttgaaaccaatgagaacaaagacacaacgtaccagaatctctgggacacatttaaagcagtgtgtagagggaaatttata

SEQ ID NO: 10209 - DNA, 201 bp, Homo sapiens
caaaaccctgtcataaatatttttgagaaaactaaaatttgtaaaccaatgaacttatacattaagggaaaggaccagaaaatatattcaaaatgcactgraagatgaaagaagatattcaaacaacattccaaaacaatagcataaaatcactatgcaaaggcactacactgtgcaaattacaatgcatttttgtaggca

SEQ ID NO: 10210 - DNA, 201 bp, Homo sapiens
atgaaaaggaacaaacaaagactccaacaaatatgaaactacgtgaaaagaccaaacctacatttgattggtgtacctgaaagtgacagggagaatggaamcaagttcaaaaccacacttcaggatattatccaggagaacttccccaaactagcaacacaggccaacattcaaattcaggaaatacagacaataccacta

SEQ ID NO: 10211 - DNA, 201 bp, Homo sapiens
gaggctgaggcaggagaatcacttgaacccaggaggtggaggttgcactgagctgagatcgcgccactgtactctaggctgggcgacagagcaagactccrtctcaaaaaaaaaaaaaaatgcttcttgttgatatggctgactactgaatagagaaaaagttactacatggctgctactggcctggactccgtgggacct

SEQ ID NO: 10212 - DNA, 201 bp, Homo sapiens
ccttcggggcctgtgacgagctacacctttttatggacacttaaaagattagagtttctgtacattttaatgaccaggtcctcagtacttctgttttgttkgttttgccagaagtagggtatatccctcatgttaaattttcatacactgatcccattttcttttgagaaaacttcagaggctcctcccatcttcctgtct

SEQ ID NO: 10213 - DNA, 201 bp, Homo sapiens
taatcccagctattcaagaggctgaggcgggagaatcgcttgaacctgggaggcagaggttgcagtgaatcgagatcgcgccattacactccagcttgagygacaagagcaaaactccgactcaaaaaaaaaaaaaaaggaaagaaaagaaaaacagtcacaaaaataatatttaaaaggataagatgtatacaaggggta

SEQ ID NO: 10214 - DNA, 201 bp, Homo sapiens
gtagacccatggtaactgttcatggaagccactgctaaagacctctgacatcttaaaaaaaaaatctagaatactttttatgaatgaaactttacattgcygcccagattgcaaacctctgagccaatattccacaaagacatgggaaatactttaaaaggcattatttatatagcacattgattttttcagttgattcaa

SEQ ID NO: 10215 - DNA, 201 bp, Homo sapiens
gatattccttcccctctccccacatacaccccaacaccatacttcctctagtcctctccatttcagtaaatgggaacttcatcatccagtttctcagggcraaaattctggagacatacttgactcctctcttctcatatccctaatctagtccatcaataaacccctgctggctccatcttcagaatatattcagagcct

SEQ ID NO: 10216 - DNA, 201 bp, Homo sapiens
ttagtttacaatggatcacatgtgggactaaagagtttgactccaatcattgatcagatcttcaaaaaaagcccctctccagaaatagacaggaaaataamtctattctgtacaagacactgcacagcactcaacagatagaagggtgagaaaaacagactttcacccaaagaaatccacagtccacaataaggtttaaac

SEQ ID NO: 10217 - DNA, 201 bp, Homo sapiens
tacgagggagatcttacctgaccactctatataaaaatatgaaactcctccaaaccagacttgcctgagtttccccattgaaatgtaaactccataaaggsaggaactttgtcttcttaattgctatatcccagaaccagaacagtgccttgtatgtgttaggtgtttaatatatatctgtttaacgaatgaatgaataat

SEQ ID NO: 10218 - DNA, 201 bp, Homo sapiens
tatgttgaataaaaatgggcatctctttttccagatcttagcaaaaaggccttcaatttttccccattcaatatgctattgactatgggtttgtcatatawggcctttattatttggaattatgttccttctattcttaacgtttgttgaggatttttatcataaagtgatgttaaattttatcaaacgttttttcagcat

SEQ ID NO: 10219 - DNA, 201 bp, Homo sapiens
gtgaaaaatgtccttgaaatccaacaaatatctgctgaaattcaagcaacagaaattattcaacaatcttgaacacttgtgattcatgtcttctctgagtyacccaaccaagtatcaaaatagagaaaaggacaacagaacattctcaacttccaaaaattagcagctttcagatatagagaagactggaggaaaagaata

SEQ ID NO: 10220 - DNA, 201 bp, Homo sapiens
tctaatcaaaaataagatgtcagggtattaaatatcctgtgttcagagttgagtttctctgtgtgtgtgtgtgtgtgtgtgtgtgtgtgcgtgcgtgcgcrcgcgcgcgcgcacacgcgcgcgtgtttaatattcgatggcaggagaggagctaactttctccctggccctgctggccctgttctgaaaagaaaactccat

SEQ ID NO: 10221 - DNA, 201 bp, Homo sapiens
aaaggccatggaccacacaatcggactcggaaattacatttcttggaattttccctgaagaataaatggtcatatacaaagttttagtcaaaaagatgcasagcaaatcactgatataagagcaagaagttggaaactatctaaattgtctagcactgggtgcttatttaataaatccaacaacagaattctaaagagcca

SEQ ID NO: 10222 - DNA, 201 bp, Homo sapiens
ttgtttgtttttatcttgtaaatttgtttgagttcattgtagattctggatatcacacctttgtcagatgagtaggttgcaaaaattttctcccattctgkaggttgtctgttcactctgatggtggtttcttttgctgtgcagaagctctttagtttaattagatcccatttgtcaattttggcttttgttgccattgct

SEQ ID NO: 10223 - DNA, 201 bp, Homo sapiens
gtatgccagctcagccacagtacaatagaacacaggtagacttctaagattttggactccagtccctggctcccagatgatacctctggacccacctgggrcctgggggaacttgctgccctgaagggaaggatacaagcctggcttcaccacctgctgatggtaggacaccagggccttgaaagaacacagcagtagcca

SEQ ID NO: 10224 - DNA, 201 bp, Homo sapiens
gcaccaaaataggtccactgggtaggagtctgatcttttttttttttttaagatgaaatctcacactgtcacccgggctggtgtgcagtggtgtgatctcrgctgcctgcaacctccacctccagggttcaagtgattctcctgcctcagcctcccgagtagctaggattacaggcacccacaaccacgcccagctaattt

SEQ ID NO: 10225 - DNA, 201 bp, Homo sapiens
ctctttcaagcccattcagaggaaacccaccagtcccccatcaaccagacccttcctttatctgttttatattcagggccataactaacataaagacagakgaggagaggaacagacagagataggagactgggacaaccagacttggtgaacactgagaataagggagggaggaggaaggaagaggaaggagctttctac

SEQ ID NO: 10226 - DNA, 201 bp, Homo sapiens
tgtatgacagaggaatagagacagcatttatttgacttacagctgagacacccatgttttagtctttaccttgacagtattttctatctgcatgaccttgkgcaagccagatcatgaattggacacattggctcttctggagtccaccttccctcctattcaggactctcaacgtggatcgcaacatccattagaggacag

SEQ ID NO: 10227 - DNA, 201 bp, Homo sapiens
cggctcacgcctgtaatcccagcactttgggaggccgaggtgggtggatcacctgaggtcaggagttcgagaccagcctggcaaacatggtgaaaccccgyctctactaaaaaaatacaaaaattagctgggcgtgatggtgggtgcctgtaatcccagctactcaggaggcagaggcaggagaattgcctggacctggga

SEQ ID NO: 10228 - DNA, 201 bp, Homo sapiens
cccctttccaagacatccctgaaggacagtgctgaagggaaatatttccagtgggcagaacttcaatcagtgcacctggttgtgtgattatatactgataygtgggctgtagccaatggtttggctgggtggtcagggacctggaagaagcatgattggaaaattggtgacaaagaaatctggggaagaggtatgtggatg

SEQ ID NO: 10229 - DNA, 201 bp, Homo sapiens
tctcaggaccgaatgacccatgtccaactgctgttcacatggaacccttctccacttcggcctttgaagttctctttagaatatgtgctactaccaccaasatctgcacctgcggcggctctgcccgggcccagccctgggcttcaagactcaccgcagcggccctcctactagacgcatagcgtccacggggctggcggg

SEQ ID NO: 10230 - DNA, 201 bp, Homo sapiens
gcatagcgtccacggggctggcgggcgggggggtggtgacctccacacatacactgcttctgttcactctggactgctggcgatggcctggtacaggcccracaatccagtgccatccattttcaggggaaccctgactaatacagggatcattcaataaaaagactccaactcttagaaatcaatttagtcactatttat

SEQ ID NO: 10231 - DNA, 201 bp, Homo sapiens
ttgtcaaatctatgttatcacttctggttaagtggcactttcttccctaacaaggctttctatgttaaaactatttggggataaatttagttattgttttstatataattcacctaagtgaagaggtgtgaatcaggtctcagagaaggaacacacaaataccatctatattttctttctttgaaacaaatactgccttac

SEQ ID NO: 10232 - DNA, 201 bp, Homo sapiens
ttactgatgtatctaatcaaaaataagatgtcagggtattaaatatcctgtgttcagagttgagtttctctgtgtgtgtgtgtgtgtgtgtgtgtgtgtgygtgcgtgcgcgcgcgcgcgcgcacacgcgcgcgtgtttaatattcgatggcaggagaggagctaactttctccctggccctgctggccctgttctgaaaa

SEQ ID NO: 10233 - DNA, 201 bp, Homo sapiens
taacttctctacctgttgctctttggggttataaagtgttttcaattatatgttcagtgattctgagaatcactcatcggaggttggtgaaactttataartcttaaatggtaaaggaacttaagtgtaagaaaaagagacaaatgggaaacaccaaccatctgtatttttaacagttcccagggctcaggcagcagaagt

SEQ ID NO: 10234 - DNA, 201 bp, Homo sapiens
tctctgtgaactagccttgcaaagttagtacaccgttcagccctccttgtcgcctttctaagtaaagtgctttctttctctgcaatatgaagttaatcgtwcagtaattctcagctgcaccatcccaattcaggtatctatatcattcctactctcagaaaactgccagccaaatggtcttcttgcttctggctttctttc

SEQ ID NO: 10235 - DNA, 201 bp, Homo sapiens
ctctgtgaactagccttgcaaagttagtacaccgttcagccctccttgtcgcctttctaagtaaagtgctttctttctctgcaatatgaagttaatcgttyagtaattctcagctgcaccatcccaattcaggtatctatatcattcctactctcagaaaactgccagccaaatggtcttcttgcttctggctttctttct

SEQ ID NO: 10236 - DNA, 201 bp, Homo sapiens
caggttagttacatatgtatacatgtgccacgctggtgcgctgcacccactaactcgtcatctagcattaggtatatctcccaatgctatccctccccccytcctcccaccccacaacagtccccagggtgtgatgttccccttcctgtgtccatgtgttctcattgttcgattcccacctatgagtgagaatatgtggtg

SEQ ID NO: 10237 - DNA, 201 bp, Homo sapiens
ggttagttacatatgtatacatgtgccacgctggtgcgctgcacccactaactcgtcatctagcattaggtatatctcccaatgctatccctccccccctyctcccaccccacaacagtccccagggtgtgatgttccccttcctgtgtccatgtgttctcattgttcgattcccacctatgagtgagaatatgtggtgtt

SEQ ID NO: 10238 - DNA, 201 bp, Homo sapiens
gtccccagggtgtgatgttccccttcctgtgtccatgtgttctcattgttcgattcccacctatgagtgagaatatgtggtgtttggttttttgttctcgygatagtttactgagaatgatgatttccaatttcatccatgtccctacaaaggacatgaactcatcattttttatggctgcatagtattccatggtgaata

SEQ ID NO: 10239 - DNA, 201 bp, Homo sapiens
aaactatactacaaggctacagtaaccaaaacagcatggtactggtaccaaaacagagatatagatcaaaggaacagaacagagccctcagaaataacacygcatatctacaactatctgatctttgacaaacctgacaaaaaacaagcaatggggaaaggattccctatttaataaatggtgctgggaaaactggctagc

SEQ ID NO: 10240 - DNA, 201 bp, Homo sapiens
aagctgtattgtatgtaacacttgagacgtgagtatgatatagtatttaatgcaagcagaggctcaacaaatgttgaatgcacgaagcaatgaatgaaagwataacttaatgaaaggaaaccctagccgaatatgtagtcagcttattaatgttattaagagcaagagagctgcagagttaaaacctgctaccttatgcag

SEQ ID NO: 10241 - DNA, 201 bp, Homo sapiens
aatgatacacacagaaggtgacgtgaagaccagcagagactggagcggtgcatctataaaccaagccatgccaaggattgccagtagaaactgggagaggrgcatgggagggattctccctcagagcctccaggaagaattagccctgctaacactttggttttcaacttctggcctccagaagggtgagagagtaaactt

SEQ ID NO: 10242 - DNA, 201 bp, Homo sapiens
tcccattattagggatgttaacttcaatcacttggttattactattacccttttgtaattaataagttcttacagaagatacttggatattatataaatayagtgatagccatttaaaaaaattacccaactctactctgtggcccaactaattctctacaaataaaaacttggcaaaatatttaaggtctgcttatgggt

SEQ ID NO: 10243 - DNA, 201 bp, Homo sapiens
tccaaaccagacttgcctgagtttccccattgaaatgtaaactccataaaggcaggaactttgtcttcttaattgctatatcccagaaccagaacagtgcyttgtatgtgttaggtgtttaatatatatctgtttaacgaatgaatgaataattgatgaacaaaaccaaacgataacaaatataaaattttcaatgaattg

SEQ ID NO: 10244 - DNA, 201 bp, Homo sapiens
tcatttttttaaaatataaagcaaaattttgtgaggtctctggaatacacacacacacacacacacacgtatacataatgtcactgatacaaacgataccraagtttctcctagtcttattacttaaattgagtaaaatgtgttattttctttagcaaatgtgaaaacaaacttgaaaggaattataagccatagctttga

SEQ ID NO: 10245 - DNA, 201 bp, Homo sapiens
taagctgcaaaacactctttatcacttcactaagcatggaagatattttagttccatttttacagtcttacgagggtaaatcttcctacatgtttctaacygggtagaactaaatagtgtcaccatggatcttttccaatttgcctttatgctttctgtattttagtctaatccacccctgccttaacagtcattgacctt

SEQ ID NO: 10246 - DNA, 201 bp, Homo sapiens
cttcaggtacaacaagtaaataagaagactctaaacaaaagaaatcgctaagctttccttatctcacactgacacagcagtgtcaacaattcaagtctctyaaaaataatgagtgagagccagtcattccaattaccaaggaaacaggcaatggagatggtttataaacagcatttggacatggactgtctcgcatacatg

SEQ ID NO: 10247 - DNA, 201 bp, Homo sapiens
tagacgtatttactgattcttaagcttctttttagaatggttaagtccttttgagttctccagaaagtgatttcacattgtaaggactcaatataaatttkctcaacaaatgaacagaaacaaaatggaggggtagcttcagattagttcagctgcctcttcagcaatttttatagttatttactaaacttgataaaagca

SEQ ID NO: 10248 - DNA, 201 bp, Homo sapiens
tgtttgttagtttcattttgctttgctaaaattcttagtcccttccctttaacacgctgtgatacgtgcttccttacaaaagatgcccagatatggagaaraaaacacatatgcacgtgtctctaatagtggcattgctgagattttatacataacatataagaaaagcttactttagtcctgtgacaagtacttttagtt

SEQ ID NO: 10249 - DNA, 201 bp, Homo sapiens
ctaccaatccaggtcactgtggtattactggcttttcacatctaaccttggcttctgaagaactgccttgagctgaacccaggtgacacaaagctaaattsattggcccttttcagtgacgattcctttcatcttctttgcttgtctcctctgatgggagttacttttgctactttcaaagtctgcaaggctggcagttat

SEQ ID NO: 10250 - DNA, 201 bp, Homo sapiens
tccttcccaatgttactcaaggtacttagcagtacaaatgcatcttatgtcctatatccaaactcttcattatctcagaaactaccaaacttgagaaacakacttgagaccacttaaggaaatgtgaatttagagtttactgttagcaacgcatacatgatgatatatacacattgtttaaatgacatacacaaaatattc

SEQ ID NO: 10251 - DNA, 201 bp, Homo sapiens
cacctccagggttcaagtgattctcctgcctcagcctcccgagtagctaggattacaggcacccacaaccacgcccagctaattttttgtatttttagtaragatggggtttcactatgttccaggctggtcttgaactcctgacctcatgatccgcccacttcggcctcccaaagtgcagggattacaggcacgagtcaa

SEQ ID NO: 10252 - DNA, 201 bp, Homo sapiens
ctctgttttcactatggcatctccccagtctctgctaggcttgatctttccaaatctaggccctacatggttcaccttttccacataatataccttctaaytccagtgtctcctgccactgcaggaaagggcaatttgtccggactaccatgggaaaaggcagggaccctgacatctatctcttgttctgcatacagattt

SEQ ID NO: 10253 - DNA, 201 bp, Homo sapiens
acaccaacgtttttggccccagggatgtggggtgaggtgaggtgggtgctgggggcgtggcaggtggtttcgggaggaaactgttccacctcaggcattasactctcataaaggaagtgcaacctagatccctcacatgcgcagttcacagtcaagtctgcgctcctatgagaatctaatgccgccactgatttgacagga

SEQ ID NO: 10254 - DNA, 201 bp, Homo sapiens
tatggctattataaatagtaaactgtcaacttccactcttcttcagaacaacaacaaaaggctttaatctatagaatgcagtgtacaggagaataagtgayattttgtgacagtgtatgttggccaatgtaatgctatctactttctcagagcaaacctgatgcagagcccctcatgtaaattgataccttcattctgttc

SEQ ID NO: 10255 - DNA, 201 bp, Homo sapiens
ttgtataagaaatgctctaaaactagatgaacatataattttccattcaaatcaggaccttttgagagtaaatgggtagtgactaataactatgccagaamaaatggtataaattgaactgttctgggtaaacaagtacacatggtcatcatatcaaaactcattttttttttttttacctcttttaaaggacactcttgg

SEQ ID NO: 10256 - DNA, 201 bp, Homo sapiens
gctctaaaactagatgaacatataattttccattcaaatcaggaccttttgagagtaaatgggtagtgactaataactatgccagaacaaatggtataaaytgaactgttctgggtaaacaagtacacatggtcatcatatcaaaactcattttttttttttttacctcttttaaaggacactcttggaggtccttcagga

SEQ ID NO: 10257 - DNA, 201 bp, Homo sapiens
atttcactaaacaggctgccaatgtcattctgaattgttttttccttaataaaatgccctagcagttcaggtcccatttcttaaatggtcataggcattcygtagatgacagagaggtgagagataatttaacctattttaacgtatgaataaagttacaattacttactaattcctagtcttatcagctttagctatata

SEQ ID NO: 10258 - DNA, 201 bp, Homo sapiens
tggaaattctcccaagttacaatgccctaaacactctcaatgtatgcacgatggtgctgtggagattactaagcaatttatcacacatgggtaatggtcaragcgactgtcaccctgcccagtcacttcccgctgtcagaaatacacaggttgagtgtttggggaaagaagatgtacagcatggccatgaataatgggaat

SEQ ID NO: 10259 - DNA, 201 bp, Homo sapiens
attaaaagttgtgaaatgtatactgagaaaaaaaacccactaaaagccataagctgtagatttgagatgaatacaacactggaatgagacttcaccgagtstttctcctgttactcaaaaatgtatttggtgaggtccctgtgtttctgcagcaagaaagggaatcctctgatcatgggtgtcttaatgctttttctccaa

SEQ ID NO: 10260 - DNA, 201 bp, Homo sapiens
cttcaccgagtgtttctcctgttactcaaaaatgtatttggtgaggtccctgtgtttctgcagcaagaaagggaatcctctgatcatgggtgtcttaatgytttttctccaaagtctcactgggtgggatgtacatgatacaatcctaaattatagtcttatgactgtgtgtgtgtgtgtgtgtgtgtgtgtgtgtgtgaa

SEQ ID NO: 10261 - DNA, 201 bp, Homo sapiens
cttaattagggatgatgtgtgtcagtaatttaatctttttttttttttttctttttgggacggcatctcactctgctgcccaggctggagtgcaatggcgygatctctggatctctgctcactgcaacctccgcctcccgggctcaagtaattcttctgcctcagtctcccgagtagctgggattacaggcacataccacc

SEQ ID NO: 10262 - DNA, 201 bp, Homo sapiens
ccaaggcctcccttgttctagtgcagtcacatactgcctttttctcctttcctgtaattagggactctgatttaactcagtatttacaggcaaatacctgycaaaatcaaggtctcatgattacaggacatactaatgccgactgagcctctacactttcacatagctttttatccccatggccacagtttcaattctgcc

SEQ ID NO: 10263 - DNA, 201 bp, Homo sapiens
agaaaattctactggagctaatattgttgtgtggtctagaaaggattagaagtctccttttaatctagggcaaaggaaaagaatcctttgaagtgactgayttctgaagtttcagggagaggtgctggagggaaagatctactaactccactcagctgcacctcccttctccaggctcagagggtttctgggttgtgcgtt

SEQ ID NO: 10264 - DNA, 201 bp, Homo sapiens
ggtttgagaaaacaggtctcctgtgaaaaagatccccctaatcagcccttcatttttctattcagcttaaaatgaagaaaaagtatctgtaaaaaaaagcragtcacctggactgtttgaagaccaaatacagcagtcctgtgggaagtaaaaattattgacaaggtaaactaagacaaaggccagcttacagaacattca

SEQ ID NO: 10265 - DNA, 201 bp, Homo sapiens
atttaccctctttatgaagaccttgtgaattaatcggaatgtgtgtaaaaacattttcacttcttagaataaagatcgtgtagatgtatgattagtaagcrtgaagtatcacaactattttctaagttatttaacttgcattgtggataaaaatatatattatttttggcactgattacagttctactgcttataattgcc

SEQ ID NO: 10266 - DNA, 201 bp, Homo sapiens
gaaggcaattttatagagctttcaagggaagaggaagaaaaaaagaagaagacaaagaagaaaagaaaatgctgccaaaaggaatcctgaaatgcaaagaytgaacagagtacatttttacagctcaattgataattcattgtttgaaagaagtaataatgaaaatgcagatagcccattcattcaatagcattagaaatt

SEQ ID NO: 10267 - DNA, 201 bp, Homo sapiens
gcaaagattgaacagagtacatttttacagctcaattgataattcattgtttgaaagaagtaataatgaaaatgcagatagcccattcattcaatagcatyagaaattactgttgttataataataatacagactaaattaatagctattcaaagaaagaaagttcctgatatatagtagaggataatttgtattctcctg

SEQ ID NO: 10268 - DNA, 201 bp, Homo sapiens
gtgcattacctatcctgagttctgatcattccttacatcatggaggcctccaggttagaaacgggttctctagtttctggttctcccaacatgaaacacastcagttacatagtaggcactttataagtatatgaatggatgaatggtaggataaaaagatggaagaagatggaggatggatggaggatggatggatggat

SEQ ID NO: 10269 - DNA, 201 bp, Homo sapiens
caaagactgtttagcaagtgattttttaaatcatacactaatttgtcaaaaaggtaccccttatttggtaactatcaaagccaaagtattgtaacacctawttttttttgagacataaaatatactgttttatttacagatatataaaatttatatttatactaaatgcattgttatcataatacatttaaatatgagtat

SEQ ID NO: 10270 - DNA, 201 bp, Homo sapiens
taactatcaaagccaaagtattgtaacacctatttttttttgagacataaaatatactgttttatttacagatatataaaatttatatttatactaaatgyattgttatcataatacatttaaatatgagtattacaattttatcactaaacctttataactaaaattgtaaacttactaaaatgcaggcataatacatgt

SEQ ID NO: 10271 - DNA, 201 bp, Homo sapiens
gtttaggcttaagaaggtccagcagtttccacttttacactcttgggagccagctaccatataggaagtctaagtaccctgcgatcaccatgctgtgaggragataaggaaccactgaagaggtcaacgtgcagaaagcctctgctgagttcctagacagaggctaacactaactgccaatcctgtggacacgggcattcg

SEQ ID NO: 10272 - DNA, 201 bp, Homo sapiens
agccattgctacaagtcaagaaaaagaaataaaaggcaatcagattgcaaaggaagaataaaacatggtgtctatattacaaaatctgctggactctacawaaggaaagctacaagaacaactgaatttaataagagttaaagaataagagatcaacatacaaaaatcaattgtatttctatatctcacaatgaacaacat

SEQ ID NO: 10273 - DNA, 201 bp, Homo sapiens
taacctttctgttggtcctcacttatttttccctcaatgcacaatagattttttaacgaattctttcctcaacatcattgggaaatatttctaacatacayatgaaattcgagaatttaatgaacagctttactcaatcttaacataataccatatttacctaagttcaaaaaaagtttcaaccaaataaaaaggtccacc

SEQ ID NO: 10274 - DNA, 201 bp, Homo sapiens
agagtatacactagtatactctggtcaagtaataggacttagctattctagcttttctagtcccacttattcctaagttttttatttactctatcttttckggtattgctttcttcttggttatgagcttcatttaggaagttcacctagtagcacactactataggtatgttgctgacctcttccccaaagcaaaaatgt

SEQ ID NO: 10275 - DNA, 201 bp, Homo sapiens
acttagctattctagcttttctagtcccacttattcctaagttttttatttactctatcttttctggtattgctttcttcttggttatgagcttcatttargaagttcacctagtagcacactactataggtatgttgctgacctcttccccaaagcaaaaatgtgtaacccttgccaagaattatgcttaagcccaggaa

SEQ ID NO: 10276 - DNA, 201 bp, Homo sapiens
actgggcatggacctccatccagagggaactttaaaacaaataaatgttcatatctataaaaattttcagaaattttcctttcataattcttgggtaggamcctaaaacatgtacattattttttctataaatttcctaggtgtgacatccaaactctagccaagtttgggaatcacattcttgtgggtacatgtgcaaaa

SEQ ID NO: 10277 - DNA, 201 bp, Homo sapiens
ggtccagaaagattcccttaaagcctcctgtactcttcccttcttctaaggcactgaggtccagagtgattattgagatgatccccttggctttttttttrttgttgttaacctcctaccataaacacccagctcccagagcaactgagcatgttttctttctcgcaaccaaaatgaaccattatcagtccactcataaag

SEQ ID NO: 10278 - DNA, 201 bp, Homo sapiens
tatgtatacatgtgccatgctggtgtgctgcacccattaactcatcatttagcattaggtatatcttctaatgctatccctcccccccctccccccacccyacaacagtcccagagtgtgatgttccccttcctgtgtccatgtgttctcattgttcaattcccatctatgagtgagaacatgcggtgtttggttttttgt

SEQ ID NO: 10279 - DNA, 201 bp, Homo sapiens
ttactgagaatgatgatttccaatcacaatagcaaagacttggaaccaacccaaatgtccaacaatgatagactggattaagaaaatgtggcacatatacmccatggaatactatgcagccataaaaatgatgagttcatgtcctttgtagggacatgaatgaaagaggtggagcctttgagaggcaattaggccacaagg

SEQ ID NO: 10280 - DNA, 201 bp, Homo sapiens
tctcctcttgttttcatatatatatttatattgcctaaatttgtatgataaacatttattttcatagccaaatttagcttttaatgatacaaatattcagytattattggtattatagaaacaaactgccacttgatcattagtttttacttgcttttaaactacttttatttatttgtgcttctacccaactatcaatat

SEQ ID NO: 10281 - DNA, 201 bp, Homo sapiens
ctacccaactatcaatatgctaagtgtaactgacattttccaaaaaaataaaattgtttttgacatgtaaaactgctaatatattccttaaaggttcttastaaggccctcttaataatttatactcatcctgaatacactttaaatgagatgacttgcatcatttatgttaaagaaaaacacccaacttttttatttcct

SEQ ID NO: 10282 - DNA, 201 bp, Homo sapiens
tcatgcagacagggtttattgatttataagctaaaatgaagagcatgtgcaattggtatttctgactggcaaagtttcagagaatgcaaatgactctgcaycatcatttcgatgtgctgatttttttttttaaagaggctatggagcccttagctcagagaacaactatcaacatatctacagaaaaatgcacataaattg

SEQ ID NO: 10283 - DNA, 201 bp, Homo sapiens
tctaacctgctcagtcattgtaaacttctatgagtccactttcaaactctgaggatccgcaatcaccacaatatctaacaggtaactctaaggtttagtcyctcccttatttttatttgaagttttcctccttaacctttttctgaagtgaaaaaaggaattcaagtcagatagaaccatttagttacaatcctatggatt

SEQ ID NO: 10284 - DNA, 201 bp, Homo sapiens
acctgctcagtcattgtaaacttctatgagtccactttcaaactctgaggatccgcaatcaccacaatatctaacaggtaactctaaggtttagtccctcycttatttttatttgaagttttcctccttaacctttttctgaagtgaaaaaaggaattcaagtcagatagaaccatttagttacaatcctatggattcaga

SEQ ID NO: 10285 - DNA, 201 bp, Homo sapiens
aaggaaattatcctagctctctgtgctgcctgcaatgtcctttcctctctgaccacctatgacagtctttcccaagagtagaaaaagagtaaacattactyctgcatataagcctaacttctgacctcagcatatacaacaacacacaacacatttacacatttcccattttcagtcaagacaatcctttttttttttttt

SEQ ID NO: 10286 - DNA, 201 bp, Homo sapiens
cctttcccacagagtcattacttttcgagtaccagtggcaacagtgagcactgctttcaaggtgccaaacttaaagacttcttttctgctacacagttatrtaattgttattttcatcttaattatccaagtgagtgggaaggcattttgagatttggctcccttggctttgaaacaaggtaactagaaaagaaactaact

SEQ ID NO: 10287 - DNA, 201 bp, Homo sapiens
ccaccagcctccttcacggggcagctctgtgacatgtacacacaagaggtgccactcttgcacgacccattatgcacccaaagtgcttgctaccatcctcygcgaagtaaaccactcacttccacagtgcaaggctatgctttcggatcattctaatccctcaagggcaccgcctctgcaatgtcttcgcaaccctcccag

SEQ ID NO: 10288 - DNA, 201 bp, Homo sapiens
cgctaacgaaagcacactttctgtgggcctaatgggtagaaaaagacatattagtcatatgaataaggggcaaagcaatgaagctaaaagttggtaacctyatccaactccagcagttgaaagcactttcacaatggggcaggtgtcaatcagaaagcagaaattccccaacactgaaaccctcactatccacagcaatga

SEQ ID NO: 10289 - DNA, 201 bp, Homo sapiens
tgacttgagcaaggtcacagagctggtaaatagtgaagactgcattcaaacctaggcagcctagctctggagtttctgtatcattgattttcaaaaaggcwtcataagccaaacatgtaagagccagcagcttgtactgctgcctctgctctaatggatctggacacttaaaatcaaaacaagacaacagcatggctatgg

SEQ ID NO: 10290 - DNA, 201 bp, Homo sapiens
aaccaacacactctacttctataccctatgcctgggcattctcagagcatgttaaatttacataacattatcacaaattaaataacagccaaattaaaacytttgcaaatgaagattaaacatatttttttttttgcctttcagaaatgttattgaaaaaaactggcaagagacatgaagtatgtttgttcttgtgcttcg

SEQ ID NO: 10291 - DNA, 201 bp, Homo sapiens
atgttgacttagtcccaaatagggattttttttcctccctcaaatctgagtgcttcacccaaattaattttaagtcacactacaaatatgagtaaagtgcygactcgagttgaaaatacatcatatgctcaacctgagtccatatgcttttcccccaatttcttcctgttttgctagaaaaaaaaatccttgaacagtttg

SEQ ID NO: 10292 - DNA, 201 bp, Homo sapiens
tgaggccaagagtttgagaccagcctggtcaacatggtgaaacactgcctctactaaaaatacaaaaacttagctaggcatggtggcacacacctgcaatytcagctacttgggtggctgaggtacaagaatcggttgaacctgggaggcagaggttgcagggagccaagatcttgccactgcactccagcctgggcaaca

SEQ ID NO: 10293 - DNA, 201 bp, Homo sapiens
cttccattctctttgtgaatggctctcctgctccaaccctaaccatcctgtgccttctccaactcagggcctttcttggagctgttccctctgcctgcaamcctcttctctccatttagatgctgttgatccctgctcatatcctggattccaggttagacatcatttcctgatgctcacatatctaaagtctatgcctct

SEQ ID NO: 10294 - DNA, 201 bp, Homo sapiens
aggcttggcaaggcatgcacagacctgccagacaacagaagtagtgatcctttgtgaactcggaatgagccttgaaggggagaaataaatcctcctccaamcaagaaagatgcgagcaagaggctgtggtgctcatttcagaaatctgttatcacggaaaagggaatcagaaaggtagtcctgaaaatgactacaagaaga

SEQ ID NO: 10295 - DNA, 201 bp, Homo sapiens
acatgcaaactgaaataaatcttgtatctcctacactgagacagaaggaaatttttaaagctcagtattaaaatttaattggtaactttgaccttgagtgmcactttaggtgaaaaatattacatcagtgctcagattttcttgagatttatgatctcatgttcttgaaaaaggcctagcacctccgtgttcctgaaataa

SEQ ID NO: 10296 - DNA, 201 bp, Homo sapiens
catgtagcatttattaagcacctactacccactggactatgcattaagttcctttccagtgcaaaagggctatagagaatatatataatatacctttgaayatggctctgaaatttggacctggtgaagtagttacacccggcctcctaaactctttaatcagttgcttttataagccactttaagtgaggccctgcaaag

SEQ ID NO: 10297 - DNA, 201 bp, Homo sapiens
tcgctttgtcaccaggctggagtgcagtggcgcgatctcggctcactgcaagttctgcctcccgggctcacgccattctcctgcctcagcctcccaagtarctgggactacaggcacccgccaccacccccagctattttttttttgcttgtatttttagtagagatggggtttcaccgtgttagccaggatggtctccat

SEQ ID NO: 10298 - DNA, 201 bp, Homo sapiens
gttttaaagtttgttttatttgtttttctagtaagtcttccacgtgtatatcattacacttgataagttgttggtaccttataacagtaagaaaaaaaatmtttttggttgccaactccaaatattgggactcaatttgttaagtcatagtgacgatggagagaacaaagcccagcagccatcttggttagaatatgttcc

SEQ ID NO: 10299 - DNA, 201 bp, Homo sapiens
ctgtgcctgtttgttcctctataaaatggagataatactagcactgacttcataggttttgcagtgagaattaaatgagttaatttaccttaaatgcttgsaacagttacagccacatggtaaggattattaagtgatagattattagctttttgttattttaaatgtttaaattcacacaaagtaattcttctactcttt

SEQ ID NO: 10300 - DNA, 201 bp, Homo sapiens
aaactatgaactggtgtatttaaaaaataacatcggaggaattttcacgcccctaaaccaactgcatttggagaggctaagatttttttatactttaaaakaacctaaaaagtattttatattgaaaaacctggagatgttcagcagatcatattttgaacaattttaaagtgcaaatttcatttgtcattctgtcatctc

SEQ ID NO: 10301 - DNA, 201 bp, Homo sapiens
cctaaaccaactgcatttggagaggctaagatttttttatactttaaaagaacctaaaaagtattttatattgaaaaacctggagatgttcagcagatcawattttgaacaattttaaagtgcaaatttcatttgtcattctgtcatctctatgcgtatactcccctccccaatctatattctcaaaagtctaggacggag

SEQ ID NO: 10302 - DNA, 201 bp, Homo sapiens
ctcccttaaaacaaactcaagtttccaaatggattgactagcctcagagcttactataatcctccatccacacaaaacagagatttttagtacagtcacayagtaaataaaaattatacttatattgaagagtgaaacaagtcactaaaaaactgatgttatatatttttaaaaatcaatgtgaaaattaattccttgtat

SEQ ID NO: 10303 - DNA, 201 bp, Homo sapiens
tccccatacccaggagcacttatacatgttctaacttctccagacagacaggaaatccctcatcatcataagcccaggcctataccttccccatccaaaaygatcctctaaagaagcatctgaaaagatgccacagagagacatcaggacagaaagagcaggcctaagtgggagctctgcaggatgtttctttaagagatt

SEQ ID NO: 10304 - DNA, 201 bp, Homo sapiens
gctgccacagattgctttacacaagaagattgcctggggcatggaacaggaggttggtttgttttttcttttctctctagcttttttttttcttttttttytttttttaacgaatacttctgattaatggaaatggaagatccatgggcagaaagtcaccttcagaagaaaagctaagtcctcatccctttgtcaatttca

SEQ ID NO: 10305 - DNA, 201 bp, Homo sapiens
ctgccacagattgctttacacaagaagattgcctggggcatggaacaggaggttggtttgttttttcttttctctctagcttttttttttcttttttttcyttttttaacgaatacttctgattaatggaaatggaagatccatgggcagaaagtcaccttcagaagaaaagctaagtcctcatccctttgtcaatttcaa

SEQ ID NO: 10306 - DNA, 201 bp, Homo sapiens
aattatcatttccagggtgaatgaagactagattaatataagggatatagagcatgaaatatagaaggttttccaacccaaggaagacaacatccaaaaasggctaacttgaacaaaaagaagtgttaagagatacttcaaatgcttaataatatttagccacatcctataacatcattaaaaattatattctggttgaaa

SEQ ID NO: 10307 - DNA, 201 bp, Homo sapiens
ccaacctctgcctactcccctttttggaattgcctttcacgccaactatgcaatgtttataacaactcctactagtcatagctttctggatcacaagtggrctcctgatccacactgatccaatcaggatctctttttgttgcttgagagtatagttagactatgttaaacattattgctataaagctctgtaaagtatgg

SEQ ID NO: 10308 - DNA, 201 bp, Homo sapiens
atgcaaaacagggaaaagaatcaaaagagcaagagagtatgttacaaactccaaaaagcaaatttagccagaggttttaaaaaaacattttcctgctttgyaatgaattacataccaaagtttagagaatgatgctactttttaattgaggatatcttagtaagcattatctacaatctgcagggcactaacagtattatt

SEQ ID NO: 10309 - DNA, 201 bp, Homo sapiens
atgtttaaagtatgataagcaaagctataatgtacaataggttaggtgcattgaatgcagttttgacttacgatagtttccacttacaatggcttaatgargacataaccccatcattaatggaggagcagctgtactgagaacagtacctggcactaaataggggtatttgcttaaaaagattttaaaatctaagtgtta

SEQ ID NO: 10310 - DNA, 201 bp, Homo sapiens
agcaataagcattttttaaagttttattttatttatttcattttattttaagttccagggtacatgtgcaggatgtgcaggtttgttacataggtaaacgygtgccatggtggtttgctgcacctatcaacgcatcacctaagaattaagtgcagcatgcattagctatttttcctgatgctctcctttcccccaccctgc

SEQ ID NO: 10311 - DNA, 201 bp, Homo sapiens
gatctcattcctctttatgtcggcatggtattctatgatatatgtaccacattttctttatccagtctatcactgatgggcatttgggctgattccgtgcytttgccattgtgaatagtgctgcagtgaacatacgcatgcatgtatctttatagtagaatgatttctattcctctgggtatatgcctagtaatgggattg

SEQ ID NO: 10312 - DNA, 201 bp, Homo sapiens
ttttctttatccagtctatcactgatgggcatttgggctgattccgtgcttttgccattgtgaatagtgctgcagtgaacatacgcatgcatgtatctttrtagtagaatgatttctattcctctgggtatatgcctagtaatgggattgctgagtcagttggtatttctggttctaggtctttgagggattgccacactg

SEQ ID NO: 10313 - DNA, 201 bp, Homo sapiens
ctaggtctttgagggattgccacactgtcttccacaatggatgaactaatttacattcccaccaacagtataaaagcattcctatttctccactgcctcascagcatctattgtttcttgactttttaataattgccattctgaatagcgtgagatggtatcttattgtggttttgatttgcatttctctaatgatcagtc

SEQ ID NO: 10314 - DNA, 201 bp, Homo sapiens
tttacattcccaccaacagtataaaagcattcctatttctccactgcctcagcagcatctattgtttcttgactttttaataattgccattctgaatagcrtgagatggtatcttattgtggttttgatttgcatttctctaatgatcagtcatgttgagctttttttttcatatatgtgttagctgcataaatgtcttct

SEQ ID NO: 10315 - DNA, 201 bp, Homo sapiens
atatatgtgttagctgcataaatgtcttcttttgagaagtgtctgttcatgtcctttgcctgctttttaatggggttgtttgtttctttcttgtaaatttktttaagtgccttgtagactctggttattagatctttgttagacggatacctaaacttcaactcttgacttttgtgcatccacaggtccaacaccacatgg

SEQ ID NO: 10316 - DNA, 201 bp, Homo sapiens
tgttcatgtcctttgcctgctttttaatggggttgtttgtttctttcttgtaaatttgtttaagtgccttgtagactctggttattagatctttgttagayggatacctaaacttcaactcttgacttttgtgcatccacaggtccaacaccacatggaagctgcaaaggcctggggcttgcaccctctgaagcaaaggcc

SEQ ID NO: 10317 - DNA, 201 bp, Homo sapiens
tgcctgctttttaatggggttgtttgtttctttcttgtaaatttgtttaagtgccttgtagactctggttattagatctttgttagacggatacctaaacytcaactcttgacttttgtgcatccacaggtccaacaccacatggaagctgcaaaggcctggggcttgcaccctctgaagcaaaggcctgagctgtaagtt

SEQ ID NO: 10318 - DNA, 201 bp, Homo sapiens
atacctaaacttcaactcttgacttttgtgcatccacaggtccaacaccacatggaagctgcaaaggcctggggcttgcaccctctgaagcaaaggcctgrgctgtaagttggccccttttcgccatggctggagcagctgggaacacagggcaccaaatccttaagctgcacacagcagtggggcccttgatccagtcca

SEQ ID NO: 10319 - DNA, 201 bp, Homo sapiens
tcctaggactctaggaccatgatggaaggggctgccatgaagacctctgacatgccctggagacattttccccattgtcttggcaattaacatttagctcytcattacttatgcaaacttctgcagcaagcttgaaattctccccagaaaatgggtttttcttttctatcgcatcatcaggctgcaaattctccaaacttt

SEQ ID NO: 10320 - DNA, 201 bp, Homo sapiens
taggactctaggaccatgatggaaggggctgccatgaagacctctgacatgccctggagacattttccccattgtcttggcaattaacatttagctcctcrttacttatgcaaacttctgcagcaagcttgaaattctccccagaaaatgggtttttcttttctatcgcatcatcaggctgcaaattctccaaacttttat

SEQ ID NO: 10321 - DNA, 201 bp, Homo sapiens
ccaacctctatccattacccagttccaaagtcgcttccacattttcaagtatctttatagcagtgccccccactctgggtaccaatttactgtattagtcygtcctcccactgctataatgtaatacctgagactggggaatttatacagaaaagaggtttaatttgctcacagttccacatggctggggaggcctcagga

SEQ ID NO: 10322 - DNA, 201 bp, Homo sapiens
agtatctttatagcagtgccccccactctgggtaccaatttactgtattagtccgtcctcccactgctataatgtaatacctgagactggggaatttatamagaaaagaggtttaatttgctcacagttccacatggctggggaggcctcaggaaacttacaatcatggcagaaggtgaagcaggtacatcttacatggtg

SEQ ID NO: 10323 - DNA, 201 bp, Homo sapiens
atagcagtgccccccactctgggtaccaatttactgtattagtccgtcctcccactgctataatgtaatacctgagactggggaatttatacagaaaagakgtttaatttgctcacagttccacatggctggggaggcctcaggaaacttacaatcatggcagaaggtgaagcaggtacatcttacatggtgacaagtgag

SEQ ID NO: 10324 - DNA, 201 bp, Homo sapiens
tcccctcctgcctggcccctcccttgacacgtggggattacaattcaggatgagatttgggtgggcacacagggccaaaccatagcataagggaagaaacyaatacttacaaagggtaagtaaatggagttcaaaatcacccaaggagtaaattgtgaagctaggattcaaacagaccaagactccagagcttgtagattt

SEQ ID NO: 10325 - DNA, 201 bp, Homo sapiens
agagggtccttttaaaatgtctgagaggaatgtgctatgatctcagtcgtctaataggattcaccttttctacaattgcctgttttctgaactcagctccraaatgagctattctctgtttcactctttttcacattatccaaaataattcaatgtccaccttttcctttgggaaaatcaaaggttgacatggctaccttt

SEQ ID NO: 10326 - DNA, 201 bp, Homo sapiens
aacaaagctgcaatttagtcatctaaaccctaaattcatcaaaatgacatcaggtagagatctgattcaagcaaaatgactactaaatgtgcaatgttttytaagccaaaagtatgctatgcattcaaatatgtaccagaatctggctgtgtgggaacaagcaacctggaaggacatagcaacctaatcctcctcagaatt

SEQ ID NO: 10327 - DNA, 201 bp, Homo sapiens
attgggaactctaactcaggtctttgcttttggccactgaaactatagctcaaggaggagattcagcaatgttcatattaaaataatcaaatttttgtacytagtaggtattttgaaaacatttaactttttttttacattattcttggcttagctatttaggttgctgcaaaagtaattgaggtttttgctattattttt

SEQ ID NO: 10328 - DNA, 201 bp, Homo sapiens
aataaatactttcaaaatactgataaaaatcagatcatgcttagctctgaaaaatagtattttcttatctactatatattacacttctttattttattcawgatgggctttatagtaattttaaatatacatctgtcactgcatttcagtgacattgcaaagaaattattgaatgaaatgtaaagtcagttaaatctataa

SEQ ID NO: 10329 - DNA, 201 bp, Homo sapiens
cacttgaacccaggaggcagaggatgcagtgagctgagatcgcaccattgcactccagcctgcacaacaagagcaaaactccatctcaagagaaaaagtgyagtgctttagtaacattctaggcccagtgggacttacaggttatgaagatacgtatcctctacgagcctgccataaagttgaagagacaaggcccacata

SEQ ID NO: 10330 - DNA, 201 bp, Homo sapiens
agttctagggtggactggagaatcctttatggtttcatgcttcgagactaaatttaggcataagagactgaatcagggcatgagaaaacgtgaagttaacrgaattcaaatagatttggacagctatggtgggggaggaaagtgaggggagcatatgtccattcagcagaataattaaagtaagaagactcatccaaagat

SEQ ID NO: 10331 - DNA, 201 bp, Homo sapiens
ctcatccaaagatattggctgctactgtatggctgtcttagtattccagaactgttcagagcagagcaggagcagacagatgagaataacatggccaatamcctttatcaaggtctaggacttctgagacattttcagcacttgagatggaaggaatggatgaaaagcactgagaaaatgaggtattcccatgtttagaac

SEQ ID NO: 10332 - DNA, 201 bp, Homo sapiens
actgtatggctgtcttagtattccagaactgttcagagcagagcaggagcagacagatgagaataacatggccaataacctttatcaaggtctaggacttytgagacattttcagcacttgagatggaaggaatggatgaaaagcactgagaaaatgaggtattcccatgtttagaaccaaaacagggtaggcataagggc

SEQ ID NO: 10333 - DNA, 201 bp, Homo sapiens
ggcataagggccacaaggctggatacagaagaaaatgggtgcttgtagaggcagcagagaaacacatcagacacttcggaaggaaagaaacatgatgagarctgtgctttcaacccaacagcagatgggtagaaacaggcccagaagtttgtttctctccacaaaggaaatcacaacatctaggtatcaaggctaccttac

SEQ ID NO: 10334 - DNA, 201 bp, Homo sapiens
ctctgatttgactcttaacccaatattaaggagtatagaaattaatatgtgagtcatgaagaacaacagcaacattttaattaggaaaatggtatctccartcatagtatttcatcataagtaaagaaacccatttattcaaagtactctttaaatgttcacctccgtctcagccccaaacagttattcctagtcatgaat

SEQ ID NO: 10335 - DNA, 201 bp, Homo sapiens
aatattccctttcctgaaggcaacaaagtaaccatactgtcctgggtagtgggtacttttaaataacaattctgatagatgaaggaaaacaaaactccttygaatttaggttattgctagaccaaaaaaaaattctctaatgaaagattttaatattatgctatcaatatccctatctcagaattaaataataatgtgtga

SEQ ID NO: 10336 - DNA, 201 bp, Homo sapiens
ttaggtttgatcctcacacaagctacaggaattccgccagaaagtcctctgtgctccggcagaggcgctctgcagatacttttcatggagaggtgtggacygccaatggccagctggctcatttcagttttcccagtcatgtctcagaaccatctttgagaaagtcattgattaaattaatcaatcaattatctacataat

SEQ ID NO: 10337 - DNA, 201 bp, Homo sapiens
tgctcatgacctctgtggttccaatcggggattctttctattacactgccctacagaaaaaatcttcatgaggacagtcatatgtatacgtatacgtataygtatatgtatatgtatatgtatatgtatatgtatatgtatatgtatatgtgtaaaaccgtgtccccaaatcagctctacaaagggaaaggcttaacacac

SEQ ID NO: 10338 - DNA, 201 bp, Homo sapiens
tacctggttcatctcactgggactggttggacagtgggtgcggccacagagggcgagccaaagctgggcagggcatcgcctcacccaagaagctcaagggrttgggggatttccctttcctagccaagggaagccgtgacagactataccaggaaaatcgggacactcccgccttaatactacgcttttccaacggtctta

SEQ ID NO: 10339 - DNA, 201 bp, Homo sapiens
attcaacatttttaaagaacagaattttcaacccagaatttcatatccagccaaactaagcttcctaagtgaaggagaaataaaatcctttacaaacaagyaaatgctgagagattttgtcaccaccaggcctgccttacaagagctcctgaaggaagcactaaacacggaaaggaacaaccggtaacagccactgcaaaa

SEQ ID NO: 10340 - DNA, 201 bp, Homo sapiens
tattcaggagacccatctcacgtgcagagacacacacaggctcaaaataaagggatggaggaagatctaccaaccagatggaaagcaaaagaaaagcaggscttgcaatcctagtctctgataaaacagactttaaaccaacaaagatcaaaggagacaaagaaggccattacataatggtaaagggatcaattcaacaag

SEQ ID NO: 10341 - DNA, 201 bp, Homo sapiens
attcaggagacccatctcacgtgcagagacacacacaggctcaaaataaagggatggaggaagatctaccaaccagatggaaagcaaaagaaaagcaggcsttgcaatcctagtctctgataaaacagactttaaaccaacaaagatcaaaggagacaaagaaggccattacataatggtaaagggatcaattcaacaaga

SEQ ID NO: 10342 - DNA, 201 bp, Homo sapiens
aatagacatctacagaactctccaccacaaatcaacacaatatacattcttctcagcaccacatcacacttattccaaaattgaccacatagttggaagtraaacactcctcagcaaatgtaaaagaacagaaatcacaacaaactgtctctcagactacagtgtgatcaaagtggaactcaggattaagaaactcacaca

SEQ ID NO: 10343 - DNA, 201 bp, Homo sapiens
aagagcaaacacattcaaaagctagcaaaaggtaagaaataactaaggttagagcagaactgaaggagatagagacacaaaaaacccttcaaaaaatcaaygaatccaagagctggttttctgaaaagatcacaaaatagatagaccgctagcaagactaataaagaagaaaagagagaagaatcaaatagacgcaataaa

SEQ ID NO: 10344 - DNA, 201 bp, Homo sapiens
aactgaaggagatagagacacaaaaaacccttcaaaaaatcaacgaatccaagagctggttttctgaaaagatcacaaaatagatagaccgctagcaagaytaataaagaagaaaagagagaagaatcaaatagacgcaataaaaaatgataaaggggatatcaccaccgatcccacagaaatacaaactaccatcagaga

SEQ ID NO: 10345 - DNA, 201 bp, Homo sapiens
tgaatgggaaaaaactggaagcattccctttgaaaactggcacaagacagggatgccctctctcaccactcctattcaacatagtgttgaaagttctggcmagggcaatcaggcaggagaaagaaataaagggtattcaattaggaaaagaggaaatcaaattgtccctgtttgcagatgacacgattgtatatttagaaa

SEQ ID NO: 10346 - DNA, 201 bp, Homo sapiens
aatgccatccccatccagctaccaatgactttcttcacagaattagaaaaaactactttaaagttcatatggaaacaaaaaagagcccgcattgccaagayaatcctaaacaaaaagaacaaagctggaggcatcacgctagctgacttcaagctatcctacaaggctacagtaaccaaaacagcatggtactggtaccaa

SEQ ID NO: 10347 - DNA, 201 bp, Homo sapiens
ggaaacaacaggtgctggacaggatgtggagaaataggaacacttttacactgttggtgggactgtaaactacttcaaccattgtggaagacagtgtggcrattcctcaatgatctagaactagaaataccatttgacccagcaatcccattactgggtatatacccaaaggattataaatcatgctactataaagacaca

SEQ ID NO: 10348 - DNA, 201 bp, Homo sapiens
ggaggaaaccatataccaagttgacttagtacaacaaacaactccaaaacaatcttactctttgagcaaatctctacactactcagacaagccggagacartagcacagtaaccaccactgtcaggttaaactctctggctgtactattattgttcatttaaaaagaaaaagaaaaaaacaacaacagatgaaaggctctg

SEQ ID NO: 10349 - DNA, 201 bp, Homo sapiens
aacaggcacaaatggtattgctgctgggaagaaaatgcatcaagagcacaaagagcatcactgattaaacaatgcttcttggctgggcatggtggctcacrcctgaaatcccaccactttgggaggccaagatgtgcggatcacctgaggtcagaagtttgagaccagcctggccaacatggcaaaaccctgtctctacta

SEQ ID NO: 10350 - DNA, 201 bp, Homo sapiens
tgaataaaatttcctctggtaattctctctctggtattcaaaatatctgagcaatatctttagattaaaacaaattatgtttgatgaaatataactctagrtttgaaatgtgagaaacatgctttttgtttttatcatataaactacagaaagtaaacttcaagaaaatattcttgtctagtggagcctgagtttgaagat

SEQ ID NO: 10351 - DNA, 201 bp, Homo sapiens
acactatgaaggctaattctgaatctacctgtttctaccacatgtgatgcttatggtatgcctcttattttaccttttcttttgctaacttttcttttttwaaaaaaacaaacaaacattttttgccattaaaagtaatggcaaagccccaattatttttgcaccaacttaaatacaattatacttctttattttttactc

SEQ ID NO: 10352 - DNA, 201 bp, Homo sapiens
acaatagtatttatcttgtcaaatctcttttttttttttttcaagacggagtctcagtctagtacccaggctggagtgcagtggcacaatctcagctcacygcaacctccgcctctcaggttcaaacaattctcctgcttcagtcttgcgagtagctgggacgacaggcatgtgccaccacacccggctaatttttgtatt

SEQ ID NO: 10353 - DNA, 201 bp, Homo sapiens
gactcaatttaaatccccaagaccacatgctgggaaggtatcattgccatcttcattttattgaggaggaaactgaggcttagagaagttagataatttgytcaagatcacactgctagtgaggcatgtaacaggattcacaaacaggtctaattttggaaactgtgcttttaccctctatattgttcctcatgatttaat

SEQ ID NO: 10354 - DNA, 201 bp, Homo sapiens
acacattttttttatacacaatgataatgacacattcacagggctgtaacacttgcatcacttttaacgtctatttctcccagagaggtttaaaggacctrtggagccagggttatcgaggaagaagcaagagctgatgctgccccctactggctttcgcttctccaaagattccagaaaacaatcattgtcaaccacaaa

SEQ ID NO: 10355 - DNA, 201 bp, Homo sapiens
ggttcggcaattaatattttttgagcatctactacgtgccaaccaccataacaggtgtacggcaaaatgatacagacactgccctcatgaagcacactgcscagtggaggaacaaatattcacagaagcatgcaattacaaacgcacaattgccatgaaggagtacagaaaggggcgggggggcgcgcgctaatttggtct

SEQ ID NO: 10356 - DNA, 201 bp, Homo sapiens
gtggaggaacaaatattcacagaagcatgcaattacaaacgcacaattgccatgaaggagtacagaaaggggcgggggggcgcgcgctaatttggtctatraagtccaggctggctttcttgagctaggacctcaaggacgaaaagctctgagttaattatttaaaataatgagctattttcccagaggctgataactaaa

SEQ ID NO: 10357 - DNA, 201 bp, Homo sapiens
acatcatgaatgcacttctaatttgaaaataattagaatggcaaattaatgctatatatatttatagcattaatgtgtgtgtgtatgtatgtgtgtgtgtrtatatatacacacatatatatacacacatatatatatatacgtatatatatatatacacacacacacacacacacttttttttttgagacagagtcagag

SEQ ID NO: 10358 - DNA, 201 bp, Homo sapiens
atcatgaatgcacttctaatttgaaaataattagaatggcaaattaatgctatatatatttatagcattaatgtgtgtgtgtatgtatgtgtgtgtgtatrtatatacacacatatatatacacacatatatatatatacgtatatatatatatacacacacacacacacacacttttttttttgagacagagtcagagtc

SEQ ID NO: 10359 - DNA, 201 bp, Homo sapiens
ctgcatcctctcttgaaaccacttcaacagcttgctggctgggctgcctgctcacagggtcttcttgaaatgtcaatcagtctgttgtaatactccctgawagaaaccttttaatagcttcccactgcagtcacaataaaatcccaattcagcatattggcctacaaggctgtgttatgtaattgccctgcccattcctca

SEQ ID NO: 10360 - DNA, 201 bp, Homo sapiens
gaaaccacttcaacagcttgctggctgggctgcctgctcacagggtcttcttgaaatgtcaatcagtctgttgtaatactccctgatagaaaccttttaayagcttcccactgcagtcacaataaaatcccaattcagcatattggcctacaaggctgtgttatgtaattgccctgcccattcctcatggctcagagccca

SEQ ID NO: 10361 - DNA, 201 bp, Homo sapiens
atttcacctgctacggcttctgcctgggtcactttcccctagatcttcgtgtggctggctgcttcttatctgctaggtctcagttcaaatgacttaaaagractttttccaaccaacttatctaaactaggactccccttgtaatcctcagttatagcagccagttcacagcactaatctcaatatggcatttttaactct

SEQ ID NO: 10362 - DNA, 201 bp, Homo sapiens
atacttgtatctaagtgattttaatatacttcttagttttatgcgttgtctaacaattaaatccatgcaaggataactattccagtaaaaaaaaaaaaatmcagttttctccactaaaaacaaatgtgtattatacataggcatgtcataatattttatttatgtgtatatatatatgtttgtgtatatatatgtgtgtat

SEQ ID NO: 10363 - DNA, 201 bp, Homo sapiens
tacataggcatgtcataatattttatttatgtgtatatatatatgtttgtgtatatatatgtgtgtatatgtgtgtgtgtgtgtgtgtgtgtgtgtgtgtrtgtatgcaatttgaattccattgtctttaggcaagaataaaaaatacaaacaaattactgatgaatctgccctaccttcatggcatcaagagccagtttc

SEQ ID NO: 10364 - DNA, 201 bp, Homo sapiens
catgactacaccattgcactctagcttgggcaacagagaaagaccctctcttaaaacaaaaaacaacaaaaccaggtaatcataatgagcttctgatcggscttctgacttgcagtctctcctcactacagtccagtcactctattgtcatcaggggtaggtttctataatataaatcagatcctgtctctaccctactca

SEQ ID NO: 10365 - DNA, 201 bp, Homo sapiens
tggagcagaactaatgagtctcctggtatagctatcaaattaaatttataagactctccaccctcatttagaagactaaccgtggaaaccatagctttgtrggctataacaagaatcacttcaaaataaatgtagtcttattataatttagtatagtagaaagcaatatggaatgtcacacaattctctttggcttactgt

SEQ ID NO: 10366 - DNA, 201 bp, Homo sapiens
tgcaatattgaggtgctcataaataaatactgataactacagaagacttggttgaaaaaatatttttatttgttttgacttgtttttaattattttctagscagtcctgttttaaggacacaaaatgtgatttatggcagctactgaccatctctgctaaaaggaagaaaaaatgtccagctgttctgttatttcccactt

SEQ ID NO: 10367 - DNA, 201 bp, Homo sapiens
gcttctgatttgaaaatcacctgccccttctcccctgacctcagtgctacactgaacaaagaaaaggaaaagggatattaaacaggcatataagccacacrctgttaaatttaagagctggctatatatctctacctgaaatttaataaaattcaaaatacatggataatacagtgactgatacaacaaacattgttcaaa

SEQ ID NO: 10368 - DNA, 201 bp, Homo sapiens
tcaaaatacatggataatacagtgactgatacaacaaacattgttcaaaagttctttgaaagcatgaagtcctcgaactcctcttcaggaaaaaaaaaacmaaaaacaaaaaacaaaacaaaaaaaaaaacatgatgtacaaaaaaacacgacttaacctaggtttctagacttatatactgttgtgatcatgcactctgt

SEQ ID NO: 10369 - DNA, 201 bp, Homo sapiens
atacatggataatacagtgactgatacaacaaacattgttcaaaagttctttgaaagcatgaagtcctcgaactcctcttcaggaaaaaaaaaacaaaaamcaaaaaacaaaacaaaaaaaaaaacatgatgtacaaaaaaacacgacttaacctaggtttctagacttatatactgttgtgatcatgcactctgtttata

SEQ ID NO: 10370 - DNA, 201 bp, Homo sapiens
tacatggataatacagtgactgatacaacaaacattgttcaaaagttctttgaaagcatgaagtcctcgaactcctcttcaggaaaaaaaaaacaaaaaamaaaaaacaaaacaaaaaaaaaaacatgatgtacaaaaaaacacgacttaacctaggtttctagacttatatactgttgtgatcatgcactctgtttatat

SEQ ID NO: 10371 - DNA, 201 bp, Homo sapiens
agaggaaaacgagagacctgaactgttctggacagaagataactcatatcacatggaatctgacccacttcagggaaggtatctctgtagcacaaatattytgcaaagaggtcagttggtttattgcttctcttaactctccactggaaaaaagacactactaataaaatgtgaatatttatcgaagacttgatgcaaagt

SEQ ID NO: 10372 - DNA, 201 bp, Homo sapiens
acatttaaagtataaaataaaatggtttagacaataaatgcttccaaaaggaaggaagaaaagaacattattgtctgagttgccaaaaaatggcaacattktggagatgtatatgaagacttacacagtaatatctcccaaatgttttgtggagattctagatccctgagatcaataatctatgtatgcaatttatgaatt

SEQ ID NO: 10373 - DNA, 201 bp, Homo sapiens
atgacaaagatttagatgattaaaaaataagcctctgaatgtagacactctaaaatatctcttactaaaatgttcataaagttggaaacaccataaatggwgtatgattatttccttaatgtacagcacacttaacaaatactatagaaataactgcaaaaacaataaaaaggtatttggcaaagtaagtaaagaccttca

SEQ ID NO: 10374 - DNA, 201 bp, Homo sapiens
gactcagttttcttatctgtcaaacagagagaattacagtaccaaccccaaggaatggtaaataagataaacagtataaagcacttagcacttttccaagygcgcaagaagagtcctacccatctaaattattatcactgttcaccccatcagctgagtgaggactgcccttgcgggagacagtgaagaatgcactagcac

SEQ ID NO: 10375 - DNA, 201 bp, Homo sapiens
gctgaggcaggagaatcacttgaacccaggaggtggaggttgcagtgagctgagatcgtgccatcgcactctagcctgggtgccagagcaagactcagtcmcaaaaaaaaaaaaaaaaaaaaaaaaaaagaatagcatcacggcactagaaattaaatattccccttaaacaatctgagtacattaccaataatcttagtc

SEQ ID NO: 10376 - DNA, 201 bp, Homo sapiens
gcttaacaggagttatttattactattcactaacagaaaaataacaaatatacaaatgcagcaaatgaggaggaatggaaagacagcatgcagtgtatccyaaagtgagtgagaactggcactcagttttgtgtctatgctattgtacactgagtccatccgttaactctaagtttagccaaagcaaataaagactgttta

SEQ ID NO: 10377 - DNA, 201 bp, Homo sapiens
tcaaccacccaagtgagaggtgaggcactggaaccaagatggctgcagtagacaggaaagtagtggaaatgggaggagtgttcaggaatagtagctgatgytctgtgagggctaagggaagaagaacccaggatgacctgggctagctgttaaggctctggaggtggacagccccaaggccgcctaccagaaaagcctcca

SEQ ID NO: 10378 - DNA, 201 bp, Homo sapiens
cgcctaccagaaaagcctccaggatgcttccaagcaagaagcccttgttctctctgtgtcttctacatggtggacatgtaccatcctgaacccagtgaggycacccactcctccacggagccttctctggcccatggtctgtgtcccctttgtgtccccataggaccccggacataactccaccgtagcatctatcacctc

SEQ ID NO: 10379 - DNA, 201 bp, Homo sapiens
gtcttctacatggtggacatgtaccatcctgaacccagtgaggccacccactcctccacggagccttctctggcccatggtctgtgtcccctttgtgtccycataggaccccggacataactccaccgtagcatctatcacctcatttaaaatgaaaatttattggcttttaaaaatatttcaggccaggcctggtggctc

SEQ ID NO: 10380 - DNA, 201 bp, Homo sapiens
taaaatgaaaatttattggcttttaaaaatatttcaggccaggcctggtggctcacgcctgtaatcccagcactttgggaggctgaggcgggcagatcacragatcaggagatcgagaccatcctggccaacacagtgaaaccctatctctactaaaaatacaaaaaaaaaaaaaaaaaattagccaggcatggtggcggg

SEQ ID NO: 10381 - DNA, 201 bp, Homo sapiens
gagatcaggagatcgagaccatcctggccaacacagtgaaaccctatctctactaaaaatacaaaaaaaaaaaaaaaaaattagccaggcatggtggcggrcacctgtagtcccagctacttgggaggctgaggcaggagaatggtgtgaacctgggaggtggggcttgcagtgagctgagatagtgccactgcactccag

SEQ ID NO: 10382 - DNA, 201 bp, Homo sapiens
ttgcttcaatatgaaaaatatctgcataaatttagacacccctgaagagtatataaaaacataagccgtgccagtgatctgttcattggtctttcaatctracaacggaaaatttcttaagggcagtagaatcaaagtgattcttcactgttgtatttccatcacctagttcacagacaggctcacagcaaccacttaaca

SEQ ID NO: 10383 - DNA, 201 bp, Homo sapiens
gtgatctgttcattggtctttcaatctgacaacggaaaatttcttaagggcagtagaatcaaagtgattcttcactgttgtatttccatcacctagttcayagacaggctcacagcaaccacttaacacaaaaatatttctggcttaaacaaataaaagagtaataccttgctaaattgttttaaagattagggataatag

SEQ ID NO: 10384 - DNA, 201 bp, Homo sapiens
gttattgctctttccacttcactaccctttctataagtttcttgtatttactgaacacttcattctgtgctagatacaccagacacacactccaaaagctkcagggagcaaaatgaggatacaatgcttcctgctctcaaaaaaccaacagtctattaggaaagaccataacaatgaagggtactgagggaaaacacagac

SEQ ID NO: 10385 - DNA, 201 bp, Homo sapiens
ttcaggttgatacaggtttgatgggcaagaatgaccagtctctggcccacccctctcatcatcacatcgtactccagtgagaatacttgtgtattctaagyagattcacttgcaccttattctctgagaagctttttgtggttgccattttctgaatgatatatttcttatttgattaaaagtggatatttttcagattct

SEQ ID NO: 10386 - DNA, 201 bp, Homo sapiens
gatcttggctcactgcaacctccgcctcccaggttaaagcgattctcctgcctcagcctcctgagtaacttggattacaggcacctgccaccacgcccagytaatttttgtatttttactagagacggggtttcaccatgttggtcaggctggtctcaaactcctgacctcatgatctgcccgcctcggactcccaaactg

SEQ ID NO: 10387 - DNA, 201 bp, Homo sapiens
ccgcctcccaggttaaagcgattctcctgcctcagcctcctgagtaacttggattacaggcacctgccaccacgcccagctaatttttgtatttttactaragacggggtttcaccatgttggtcaggctggtctcaaactcctgacctcatgatctgcccgcctcggactcccaaactgctgggattacaggagtgagcc

SEQ ID NO: 10388 - DNA, 201 bp, Homo sapiens
gcctcccaggttaaagcgattctcctgcctcagcctcctgagtaacttggattacaggcacctgccaccacgcccagctaatttttgtatttttactagaracggggtttcaccatgttggtcaggctggtctcaaactcctgacctcatgatctgcccgcctcggactcccaaactgctgggattacaggagtgagccac

SEQ ID NO: 10389 - DNA, 201 bp, Homo sapiens
ttagtaattcttaatcttggagaagttatgattttattttcatttcatccttcacttaaatatttattgagtatctgcatatgccataaattctactaggygtcagggatgaaagggcaagggaaagatgtaatccctttccttagggagttatcaataccctggaaaagagagaggcatgtaaacaaatcactgcaatca

SEQ ID NO: 10390 - DNA, 201 bp, Homo sapiens
agactccctctcaaaaaaaaaaaaaaaaaaaaaaaaaagaagaacatgcaccgaactgtcaacaatggtgactatctaggaggtgaaactgctatgaaatygcgcttttctattgattttttaacatttctatactgttagaaattttactgataggtatacataaacttttattcagaagaagatttttttaatgcaaag

SEQ ID NO: 10391 - DNA, 201 bp, Homo sapiens
ttggagcctatgtctaacatgagttggctgtaaatgtgtaggcttatatctgggtggtctattctgttccattggtctacatgtttgtttccatgccatgytgatttggttactatatttttgtagtatatttggaagtcagatactgtgatgcctccagctttgtagttgttgctcagaattgctttagctattcaaggt

SEQ ID NO: 10392 - DNA, 201 bp, Homo sapiens
ttggaagtcagatactgtgatgcctccagctttgtagttgttgctcagaattgctttagctattcaaggtcatttggggttccagataaaatttagaacakttttctatttctgtgaagaatatcactgatattttgataaggactgcattgaatctatagattgctttgagtagcactgtcatttgaactgttaaagcaa

SEQ ID NO: 10393 - DNA, 201 bp, Homo sapiens
ttgtgtgcttgtctggttttggtattagggtgatgttagctttgtggaataagtttgaaagtatttcttcctcttcagttttttttttttttgaagagttmgagttgaattggtatcagttctttaaatgtttggtagaatttagcagtgaagccatcaggtcctgggcttttctttaatgagagactttttattacggct

SEQ ID NO: 10394 - DNA, 201 bp, Homo sapiens
caggttgtatgtgtccaggcatttatctgtttcttctagttttcccaatttgttggcctatacttataatagtttctaatgattctttttatttctgtggyctcagttgttatgtcgcctttcttgtttctgattgtattcatttgggccttctctcttttttggtagtctatttaaaggtttgtcaatattgtttatctt

SEQ ID NO: 10395 - DNA, 201 bp, Homo sapiens
gttggcctatacttataatagtttctaatgattctttttatttctgtggtctcagttgttatgtcgcctttcttgtttctgattgtattcatttgggcctyctctcttttttggtagtctatttaaaggtttgtcaatattgtttatcttttcagaaaaccaacttttcatttttaaggctgggtttagtttgttcttgct

SEQ ID NO: 10396 - DNA, 201 bp, Homo sapiens
gcaaacaattagtgtgctactagtcccaaatgagggaggtctcaaaagggatactagcagtgtggggaggctggctcagggtttgtgcccaggatatctgyggaatgtaccacctatagcatggtactgaaaagccactgacttggcatctcctttggccaagttacaaagcagagtttccagggctacagatggtagccc

SEQ ID NO: 10397 - DNA, 201 bp, Homo sapiens
acttctctgtggccccaggaactcactcatcctcatactgagttctgggatattgttagtcttgctgctgtacatttgattttggttttctgtgggggccrttgaagccagcttgcttctatgccaccattttgaaatttaagtctccaataatggcttttactatcttcaacccttgagggtaagaacatacgttggaat

SEQ ID NO: 10398 - DNA, 201 bp, Homo sapiens
gagtttcacagtttataaccagcacatagcccagccccactctgcttcatacacactcctacctcctaagtctgactcagctttgcaaacatctgagaccraaaagatgctagcaatccatatacatctttgaccttttaactttaccttgaaattcaatgtaacttatggcatgttactttaaaagcaatataacatgct

SEQ ID NO: 10399 - DNA, 201 bp, Homo sapiens
ttctcccacctaaagagatttttatgttattcttggcaactgaaaaataagcaaagcctcatcatttctttctttggactacttttttggtttcctttgaycactgtcagttcagcaatattttgaggtggaatcagcactataattagacacaacctaagagtctgagaaatcaacactaactcccaatgaaaagaagaa

SEQ ID NO: 10400 - DNA, 201 bp, Homo sapiens
gtgtttataaagaccatatattttgaaataatttcttccttttttaacaaacaattttcaacaaaagaaaagactgattagaattctgctgataaattgcmactgattgggtaaatcctagagatacttggactcgaacagcagcagcctagaccaggattttcaaccttgcctttgggggctgggaagattcactacaga

SEQ ID NO: 10401 - DNA, 201 bp, Homo sapiens
gactatttttaatgtactcaatggcattcaattccgtatggtgaataatgtatagtgctcagaagcccaagtaacaattggtctagaactgttaaatcacrttgcaaaatataacacctactagaaatctacatccaaggtttatttcccattcagttaatcatcaaccaagaacctattaggggtcaagcactaggaata

SEQ ID NO: 10402 - DNA, 201 bp, Homo sapiens
gtgctgcaatacacatgggggtgcaggtattcctttgatatactttttttctttcctttgaataaatacccagtcagtagcgaaaactgctggatcacacratagttctatttttggggaaatcttcatactgttctccataatggctatactaatttacattaccaccaacagtgtataagagttcctgttctccacatt

SEQ ID NO: 10403 - DNA, 201 bp, Homo sapiens
agtctccacgggcccaatactaatcaatcagtatccacatggagctctactgtgttccctcagatatattctctatacgtttagtggaaatgcacccagtrcagttttttttttttaaaccataaaatgctgatcatgctttcagtaatgattacctaggaatcacacagacgcaaattccggaaaagagggaaggagggg

SEQ ID NO: 10404 - DNA, 201 bp, Homo sapiens
gtaatatattaattcttatttcaaaaacaagagaaaatgatattagagacaggcacagtggcttgaggctataatcccagctacttgggaggctgaaggtrggagaattgccttgggccaggagttcaagaccagcctgcacaacataacaagactctgtctcaaaaaaaaaaaaaaattcaaaaatgatatgacacaaat

SEQ ID NO: 10405 - DNA, 201 bp, Homo sapiens
tggcttgaggctataatcccagctacttgggaggctgaaggtgggagaattgccttgggccaggagttcaagaccagcctgcacaacataacaagactctrtctcaaaaaaaaaaaaaaattcaaaaatgatatgacacaaatatgacaaagtgttaatatctcttaaatcttggtgatgagaacaggaatgcctcaaatt

SEQ ID NO: 10406 - DNA, 201 bp, Homo sapiens
aataattaaatgatctcttcgaaaaaatgggggtacttggttactgtaatagtccaggcaaaagatgatgttggcatgaactaaaatagtagcaaaagagkttcattccttctataataattatgtcttgaacacctactacataccaggcacttttctaggtaatatggacatgtgaagagtgaagttaacaagaccctt

SEQ ID NO: 10407 - DNA, 201 bp, Homo sapiens
gaaatttttctgagaaagggaaatgagaataaggtgataactaacgggggaatatggaagcaaggaacttctttgtttgtttgtttgttttacagtgaagsaaactattaacacatgtgtatattgatgaggatggccccatacggaggttcaaatggataatgacatgtacattttcagaaccaatgtacaaggtattct

SEQ ID NO: 10408 - DNA, 201 bp, Homo sapiens
ggaacatatacactatctatatctgtacttccagcaagaggacattttatgtatgcagcattttcagttaaataaaacatttaactgaatgttaaattcasttaaaatatttcaatatattaattgtaaaaggtagtatggctcaactataaacatatataatgtattccttataatcactagtaataactaagtggttag

SEQ ID NO: 10409 - DNA, 201 bp, Homo sapiens
aactgaatgttaaattcagttaaaatatttcaatatattaattgtaaaaggtagtatggctcaactataaacatatataatgtattccttataatcactaktaataactaagtggttagtcacaatgatttactaggccccatgcagaatcttattaagaattagaaataatataaaaatataaaaagcaatattaaccaa

SEQ ID NO: 10410 - DNA, 201 bp, Homo sapiens
aaaggtagtatggctcaactataaacatatataatgtattccttataatcactagtaataactaagtggttagtcacaatgatttactaggccccatgcasaatcttattaagaattagaaataatataaaaatataaaaagcaatattaaccaaaagaaatagaagaacaggaacactattttaagagtaaaagaaccca

SEQ ID NO: 10411 - DNA, 201 bp, Homo sapiens
aaggtagtatggctcaactataaacatatataatgtattccttataatcactagtaataactaagtggttagtcacaatgatttactaggccccatgcagratcttattaagaattagaaataatataaaaatataaaaagcaatattaaccaaaagaaatagaagaacaggaacactattttaagagtaaaagaacccac

SEQ ID NO: 10412 - DNA, 201 bp, Homo sapiens
caactataaacatatataatgtattccttataatcactagtaataactaagtggttagtcacaatgatttactaggccccatgcagaatcttattaagaawtagaaataatataaaaatataaaaagcaatattaaccaaaagaaatagaagaacaggaacactattttaagagtaaaagaacccacagatgctgaagaag

SEQ ID NO: 10413 - DNA, 201 bp, Homo sapiens
ctataaacatatataatgtattccttataatcactagtaataactaagtggttagtcacaatgatttactaggccccatgcagaatcttattaagaattakaaataatataaaaatataaaaagcaatattaaccaaaagaaatagaagaacaggaacactattttaagagtaaaagaacccacagatgctgaagaaggta

SEQ ID NO: 10414 - DNA, 201 bp, Homo sapiens
actaaatgatttgtgaaaagaattacaataggacaattacaaatctactgctagtctccagagcaaatgaaaggggatgatagtgctgcttactacagcaytattgtattttaaatctgggttgactcactgtatgatattgttaaagtcaaacaattgtccctcaaccatctgttcccctgatttatatagcttttatgt

SEQ ID NO: 10415 - DNA, 201 bp, Homo sapiens
agctatcaggaacttaaataaatcaagcacaaaacaggaactccattgaaaagtgagcaaaggacatgaacagacccttctcaaaagagaacacacaagtytccaacaaacataaatgttcaacatcactaatcagagaaatgcacatcaaaaccagaatgagatacaaactcacatctggtcagggtggcttttattaaa

SEQ ID NO: 10416 - DNA, 201 bp, Homo sapiens
tttcactttttaaatgtagcaactagaaaatttaaaattacatggcttgcatttatggctctcatatttctattagacagcattattctagtttcactacstagtaataaatttttctatactaccattgctcatgccccaaattactcaaaaacaaaaatcaatttaataagaatattaaagagaatactgaaaaacaat

SEQ ID NO: 10417 - DNA, 201 bp, Homo sapiens
gggtgagcattataactgacagctctggaatcaggctacttggatttaaatcctgactcttaaacacacatcctgagtaagtttcctataaacctttggtrcttcagtttttgtatatataaaataaggatgataagagtacctactaataaaattgtcattagaatttgactagatatgtgaagcccttagcacaacaca

SEQ ID NO: 10418 - DNA, 201 bp, Homo sapiens
ctacagaataggagaaaatttttgcaatctatccatctgacaaagggctaatatccagaatctacaaggaacttaaacacatttacaagaaaaaacaaacraacaaccccatcaaaaagtgtgcaaaggatatgaacagacacttctcaaaagaagacatttatgtggccaacacacatatgaagaaaagctgatcatcac

SEQ ID NO: 10419 - DNA, 201 bp, Homo sapiens
atcattctactataaagacacatgcccacgtatgtttattgcagcactattcacaatagcaaagacttcaaaccaacctaaatgcccatcaatgatagacyggataaagaaaatgtggcacatatacaccatgggatactgtgcacccataaaaaagaatgagttcatgtcctttgcagggacatggttgaagctggaaac

SEQ ID NO: 10420 - DNA, 201 bp, Homo sapiens
cacccataaaaaagaatgagttcatgtcctttgcagggacatggttgaagctggaaaccatcattatcagcaaactaacacaggaacagataaacaaacayggcatgttctcacttataaatgtgagctgaacagtgagaacagatgggcacagggaggggaacatcacacatcagggcctgtcgaggggtggggggcaag

SEQ ID NO: 10421 - DNA, 201 bp, Homo sapiens
ttcttccttttaatttgtagagccagactgatcaactatttttaaggtttctcttcctaattgtcattcctccctattatctgcaaacatctaataaaggytaccacacatatatatatatatttcctttcgtatggctgcatagtgggaaaccaagcaacagtacaggtaagtgtgcccttggcattgccctccacagca

SEQ ID NO: 10422 - DNA, 201 bp, Homo sapiens
gctaaagtttaatttcattcacataataatcccacaatggtgttcctgcttagcagatgactttcccctacatagcgaccgagcatccatccctttgtgcytttgccatcttctaaagccaaaacctctgtactcagttggtgtttagagaaaacacacaaaaacaaaagcatggaagatagcacatcgaatgtttttatg

SEQ ID NO: 10423 - DNA, 201 bp, Homo sapiens
actgatgtccttgttaggactggtagggtgacccacaataaatctaatagtatgaggactacaaaacctaatgaaaaaaaattcagcctaataacaaagcrgccagggggaataaaagaggactcaaaggcaagatacaggaagatgtctcacagctcttcctttgtgtcaactctagaaaaatacctgctgagtccagag

SEQ ID NO: 10424 - DNA, 201 bp, Homo sapiens
agtgcagtgcttgaggtccaaaggcttcactaccattggtgcccaacagtcttccctcacagaagctgcagaggcagctaggaagcaacagaagcacagcygggcatgttctgagtaggagaccaccccatgcacactcataagcaagctcacaaatgacactgtgacacaggtggagtgggtgagaagcaagatgagaga

SEQ ID NO: 10425 - DNA, 201 bp, Homo sapiens
acacctgtaatcccagcactttgggaggcggaggctggaggatcacttgagcacaggagttcaagaccaacctgagctacatggtgagacctcatctctayaaaaacttttaaaattagctgggtgtggtgttgtgtgtgcctatagtcctagttacttggcaggctgaggcaggagggtcgcttgagcccaagagtttga

SEQ ID NO: 10426 - DNA, 201 bp, Homo sapiens
tgctcctcagcttgcagacagcctattgtgggaccttgtggtggtgtgaattaaaactacctaataaattctcatatatatgatatatattctattcttaytaaaaatcctaagttaactataaattttgaactttgttataactttttagactgtagtaacattttccatgacaatgaatggtacaggtttaggaacaat

SEQ ID NO: 10427 - DNA, 201 bp, Homo sapiens
tacccaggctggtcttgaactcctggggctccagtgattctccaccctctgtttcccaaagtgctaagattatagacgttgagccagcacacctagccccytgagacatttcttgattagaaaacatgctttaggatctatttatctaaaagagtacattccttgtatttaaactctgcataaaaacatggaataattctc

SEQ ID NO: 10428 - DNA, 201 bp, Homo sapiens
tgataaacccatgagtaaaatgatcagatctacatttttggaagattatgttgaagatgagcttgaaacgattcaaaactgatggcaagaaaacacctagragacaatttcaataatcccagtgatgagtacctcaactaaaggcaaaagcaaggagggttaaagaaaaggcattttggcttggcatggtgtctcatgcct

SEQ ID NO: 10429 - DNA, 201 bp, Homo sapiens
tcagttttatacataatgagtttgaagcaattgtgtgatacctaaatagcatgatatctaaatacctaatatcatgtgcaaatatgagaaattctggagtmaacaaaagtttgttttcctcactgcaggacttttcagttcctttactatgctatatctcataaatacaatatgcagtgtttaccaaactcattggaacaa

SEQ ID NO: 10430 - DNA, 201 bp, Homo sapiens
cctcaagatcgatgatatttctggaatcactggcaaggaaaagaaagcattgactatgaagctgggactgtacttctattttattatttacatgctgcaarataggttctgggactttgtctttatatctcctcttgcatatacgataggagatgtagaggcttaacaaatggtctccaaattgcttggaacttcggtaat

SEQ ID NO: 10431 - DNA, 201 bp, Homo sapiens
ccctcaacgtcccccattccccccctctcccccgaccagacctcagcagtcttagaaaagaaatctccctctttcaggagcttttttcagtatttaacaamcctgaagagtgagagtcatatctaacctgaaggcctctgctgactcttaaatgagttcaagttactaaactcactcctctttcctgtgtgattaaaaaaa

SEQ ID NO: 10432 - DNA, 201 bp, Homo sapiens
aattaaatcctacggaatggaggaaaacaacctatccacatcctgttaaaatgtatatattcacgacatcagaaattattttgtttctgaattaacactaytcacattttttcaacttaaaactacaagaattatttcagttccattacccacaagctaggacctataaatgggaaaaataatagtatccacatgttggga

SEQ ID NO: 10433 - DNA, 201 bp, Homo sapiens
tttttcaacttaaaactacaagaattatttcagttccattacccacaagctaggacctataaatgggaaaaataatagtatccacatgttgggattgatgygctgattccctcaatatatgcaaagtacacgttatgtgctatgtgaatgtttgcactatggtacagtagtggacaatcagctagacctgagttcaaactg

SEQ ID NO: 10434 - DNA, 201 bp, Homo sapiens
atatatgcaaagtacacgttatgtgctatgtgaatgtttgcactatggtacagtagtggacaatcagctagacctgagttcaaactgctgcttcaatctcwaatagatatgtgatttgggatgcagaagagaaaaatgtagtacctaacctcttaacgttgttacaattttacaaattatacatgaagactgaacagactg

SEQ ID NO: 10435 - DNA, 201 bp, Homo sapiens
taccactgctaaaatattttaagcagtcaaaaatacatttatccttgagaagcatacagtttatgctttcacattcaattttttgtagtatcaactctccyacaaagcttccgttgtctaatcaatctagcatgcaatctcattccagtagaacaccaccatgcattttaaagtatttatatatttttccaacatttatca

SEQ ID NO: 10436 - DNA, 201 bp, Homo sapiens
tcacttttcctcattccaaacgtctcacaacaggccgtgagaaatgtccttatgttcttcaaacagagaaactgaggaatggaaaagagctgttagcatawagttaattattctgaatgctatccaccctctgtaacactcaagactgctctaaaaatgacaagaaagcatcaagcagcctttgaagttgcttttcaatta

SEQ ID NO: 10437 - DNA, 201 bp, Homo sapiens
ctgtgggaagaccagagtgtggtcactttttgactgtgttaaatctgagaggcctattagtcatccaataagtgtggagtccaggggataggtgtgtactwcagacagaaatatgggagtctttagtgtacagaggactgttaaccatgacactggctgaaatgactgtggaatagagcaaagaagaggagagtacctgag

SEQ ID NO: 10438 - DNA, 201 bp, Homo sapiens
gctgcagacggccaaataggatttagaccaacggattggtcaacactgcccatggattctggcagtgtgaaagtcacgggtaccttgacaaaagcaggctytatatggaggagtgggatgaaaggcctcttggagttggtttcagagacaaagagagaaaaggaagtgaagacagaatatagactcctgagttttgctgca

SEQ ID NO: 10439 - DNA, 201 bp, Homo sapiens
gttaacttaacaatttgttagaatttagaatttcaggacttagaattaaataactttaaatttctttaaatattcagtgtatccatataagagttgccaaktaaggatacacaaaagtttaaatagccatgcatcctcatttaacaaatattcatgaggtgcctcttatgcactaggcataatgaaactccataaaacaaa

SEQ ID NO: 10440 - DNA, 201 bp, Homo sapiens
ttggctttgtcctagaagtgatgaggttaaaaggtcttaattagaaaactggaggccaggtgcggtggctcatgtctgtaatcccaacacttcaggaggcygaggtgggcagatcacctgaggtcaggagctcgagaccagcctggccaacatggcaaaacctcatctctgctaaaaatacaaagattagctggctgtggt

SEQ ID NO: 10441 - DNA, 201 bp, Homo sapiens
cgacttctccaaagttgctaggaataatggactagtggtgttaactgaggcaatggaagaggaaaaacctctacagcttattgtgagatgagttatttcartcccaaatgagaaatgacatttcatgagaaggtcggtgagtgctaatagaccttcacacaatgtagattttctaacttatatttgatgaggcaaggacca

SEQ ID NO: 10442 - DNA, 201 bp, Homo sapiens
tgtgtttttagtctttgcactaaaaaactgaatacctgggaagtgcagaggtcaaagttagcctggatcatctattttcctaagttaattaacctgctaaygaaagtggtgcatgtcgctgcctttggtgaaagaaagtagcactcaactattttgttagccagaagacagctagctcaaagcaacctagagatggggccc

SEQ ID NO: 10443 - DNA, 201 bp, Homo sapiens
cactaaaaaactgaatacctgggaagtgcagaggtcaaagttagcctggatcatctattttcctaagttaattaacctgctaatgaaagtggtgcatgtcrctgcctttggtgaaagaaagtagcactcaactattttgttagccagaagacagctagctcaaagcaacctagagatggggcccagtttaaaaaaaaaaaa

SEQ ID NO: 10444 - DNA, 201 bp, Homo sapiens
actgaatacctgggaagtgcagaggtcaaagttagcctggatcatctattttcctaagttaattaacctgctaatgaaagtggtgcatgtcgctgcctttrgtgaaagaaagtagcactcaactattttgttagccagaagacagctagctcaaagcaacctagagatggggcccagtttaaaaaaaaaaaaaaagttaaa

SEQ ID NO: 10445 - DNA, 201 bp, Homo sapiens
taatgaaagtggtgcatgtcgctgcctttggtgaaagaaagtagcactcaactattttgttagccagaagacagctagctcaaagcaacctagagatgggscccagtttaaaaaaaaaaaaaaagttaaaaagaataagacctagtatttgtacaacaggcagactatagtcaataataatttaactgtacatattaaaat

SEQ ID NO: 10446 - DNA, 201 bp, Homo sapiens
agccagaagacagctagctcaaagcaacctagagatggggcccagtttaaaaaaaaaaaaaaagttaaaaagaataagacctagtatttgtacaacaggcrgactatagtcaataataatttaactgtacatattaaaataactagaagagtacaattgggttgtttatatcacaaaggataaatgtctgaggggacagat

SEQ ID NO: 10447 - DNA, 201 bp, Homo sapiens
ttgtacaacaggcagactatagtcaataataatttaactgtacatattaaaataactagaagagtacaattgggttgtttatatcacaaaggataaatgtytgaggggacagatacctaattttccataatgtgattattacacactacatgcctgtaccaaaatagctcatgtaccccataaatatatacacctactatg

SEQ ID NO: 10448 - DNA, 201 bp, Homo sapiens
gaaggaggggagctggggtttttcctcattagagtacaacattcaaaatgagggaaaaggtgacacataagtctgtcgcttttatttcttttatttttatwtttttgagatggcatatttttccttacctggataatactgctatatgatatgctaatggcagactaatgctaatgttacatcaattcactaaatgaattc

SEQ ID NO: 10449 - DNA, 201 bp, Homo sapiens
gagctgggagctacaggttctttcctgaaggggatgataatcttgagaaagagagaaacacatgaacaggacatgtcaatcccactaggtttagttccaaygaagggagattcatatctccaaggaagtggctgaactgaacatccaaggatgaacaaaaaggtcatgagaaacagtatggtgagaagcaaggggactagc

SEQ ID NO: 10450 - DNA, 201 bp, Homo sapiens
aaaggtcatgagaaacagtatggtgagaagcaaggggactagcatatgaaaaggcctggccaaaattttggaggaaatgcaggaattcaactggaagtcasaattaatttctccataaggacaagataatgcctcacggccatgaccctgcctcctacaaacaacttacaatattgacatatgtcccaggtatgacactaa

SEQ ID NO: 10451 - DNA, 201 bp, Homo sapiens
agaagcaaggggactagcatatgaaaaggcctggccaaaattttggaggaaatgcaggaattcaactggaagtcagaattaatttctccataaggacaagrtaatgcctcacggccatgaccctgcctcctacaaacaacttacaatattgacatatgtcccaggtatgacactaagaacttgccatggagtatctcagtt

SEQ ID NO: 10452 - DNA, 201 bp, Homo sapiens
taatgcctcacggccatgaccctgcctcctacaaacaacttacaatattgacatatgtcccaggtatgacactaagaacttgccatggagtatctcagttwatacacataacccgatgaagaagatgccattattccattctatccataatgaaactgagatgccacaaataaccaaagctatggtagctaacaagtatag

SEQ ID NO: 10453 - DNA, 201 bp, Homo sapiens
gacatatgtcccaggtatgacactaagaacttgccatggagtatctcagtttatacacataacccgatgaagaagatgccattattccattctatccatartgaaactgagatgccacaaataaccaaagctatggtagctaacaagtatagagtcaaatctgaagcccctgccagcacccttcccctccatgctacgcag

SEQ ID NO: 10454 - DNA, 201 bp, Homo sapiens
aggtatgacactaagaacttgccatggagtatctcagtttatacacataacccgatgaagaagatgccattattccattctatccataatgaaactgagaygccacaaataaccaaagctatggtagctaacaagtatagagtcaaatctgaagcccctgccagcacccttcccctccatgctacgcagcctctcggggag

SEQ ID NO: 10455 - DNA, 201 bp, Homo sapiens
ttttatatctgctgctgctctgcagtggttagtataaactcaaatttacaaaataaaaatgaaaaaaaaacctgcatttgccatgggaaagaaaaactatyagaaaaattaagtttaaaaaaaatacaacaaaaacacatccaaaagcattacattaacaaatgttctaccaattgtatttctattcaaaagcaaggaaac

SEQ ID NO: 10456 - DNA, 201 bp, Homo sapiens
aacaaagtgcaacattccccacaagtgacttcaacttcagaaaaagttggcctatataatttctatgtagcaataaccaacaaacccagtgtttaaactgyagctcagatcagcaaaacacgtagcgctagactaggcaacctactctcccctcttcctttccccaactacaaaggagaacaccactttctttctcaatgc

SEQ ID NO: 10457 - DNA, 201 bp, Homo sapiens
ggtttcagtatgttggccaggctggtctcgaacttctgacctcaagtgatccccccgcctcggcctcccaaagtgctgggattacagatatgagccactgrgccgggcctaccctgactcactttgaaacaaaattattctcatatatatcagtcactgtttctctgtactaaattacattctattttctgtctatatttc

SEQ ID NO: 10458 - DNA, 201 bp, Homo sapiens
gatccccccgcctcggcctcccaaagtgctgggattacagatatgagccactgagccgggcctaccctgactcactttgaaacaaaattattctcatatayatcagtcactgtttctctgtactaaattacattctattttctgtctatatttctacctaattgatattctttctcggcacgcacactcctctgaatttag

SEQ ID NO: 10459 - DNA, 201 bp, Homo sapiens
tcactttgaaacaaaattattctcatatatatcagtcactgtttctctgtactaaattacattctattttctgtctatatttctacctaattgatattctytctcggcacgcacactcctctgaatttagcatcatctccaaattttacataaatttaaagataggcccatctacattttacaatcggcggcttagagaag

SEQ ID NO: 10460 - DNA, 201 bp, Homo sapiens
tctttttcccaccttgtcttagccttcccataaacactgccatctctaaatcaaaaggagtttgtattctgttcagaaacttgctaatccaaacaatctcyattacccctcaccacattctcaccatacacactatttctgtctggggctcaatagtgaattaacagtgtttcacttccagtgggaagagaaaaatctaac

SEQ ID NO: 10461 - DNA, 201 bp, Homo sapiens
ctcgaattctgttaattcccacaaccagacacctttagtctgccttctttgagtcaaatgttcacagtgaaattaatttcaatgaattaaatgttttatcyttctttacccccaactctagtaaataccttaatttctgtgctctgcaaatctgcaccaaacttagccatttttctaccaaaaatggaagacactttcaga

SEQ ID NO: 10462 - DNA, 201 bp, Homo sapiens
gccctgatcatggcctactacaaggcaaatgaaatacacacacacgcacgatatacaggggaagaaaactaggaacaaaagacctggatgcaaatcctggytctgccatcaagaactgtgtgactagaaggaggtaacttagtgtagtcattaagaaagggctcagttggggtgggcacggtagttcatgcctgtaaaccc

SEQ ID NO: 10463 - DNA, 201 bp, Homo sapiens
tggatgcaaatcctggctctgccatcaagaactgtgtgactagaaggaggtaacttagtgtagtcattaagaaagggctcagttggggtgggcacggtagytcatgcctgtaaacccagcactttgggaggccgaagcgggtggatcacctgaggtcaggagttcaagaccagcctggccaacatggtgaaaccccgtctc

SEQ ID NO: 10464 - DNA, 201 bp, Homo sapiens
gttctcacagctacccccattttacagatgaggaaacagaggtagagagatgttaaatagttgcccaatgtcatacagccaatagttagaggaggtaggawtcaaactgaggcagcctggcttcacagttactaaactatgaagttactaaacacctcactatgcctttagactacccagtgacacaggaaagaaaaactg

SEQ ID NO: 10465 - DNA, 201 bp, Homo sapiens
ttctgtacacttgtaaaagacttacaataaataatagagtagcatttttattaaatagtaatcccaccccaatcatgtgtccttgctcaaaaatgaattakttataaattttgcatatttttacacaactgtgaaattttatacttaataaacattaatcacatagcaatatgaaaattctttattgttactatgcatact

SEQ ID NO: 10466 - DNA, 201 bp, Homo sapiens
ctcacaggaaattacccctgaaacaattcagcagtaacaccaggaaactgctgctacacagaaagtgctcaatgaagtggcaccagaaatgtggcccagcrgggatccattttcagcttggacttcttgcaggaagtaactctccgtgccagaggtgctgccacacactttctcccatggccacaagcacctgcaggattc

SEQ ID NO: 10467 - DNA, 201 bp, Homo sapiens
gtggcaccagaaatgtggcccagcggggatccattttcagcttggacttcttgcaggaagtaactctccgtgccagaggtgctgccacacactttctcccrtggccacaagcacctgcaggattctaattccatcagaacaacacagatacataatgttcaatttaggcagccagagcactgcagaaccatggagccattt

SEQ ID NO: 10468 - DNA, 201 bp, Homo sapiens
aaaccatgagaattgaaaaagtagagggagaaagagagaaaagacaagaagaggtgagtatcaggagcaacaggggagggaacaggagcaaccaggacccrgaaagggcatatggaaagctgagaatgccacgagggaaggaaaaggaggaagtgaggcaggaaaggagctacccacacagcaccagggtcgcagtttagt

SEQ ID NO: 10469 - DNA, 201 bp, Homo sapiens
aggagctacccacacagcaccagggtcgcagtttagtcaagaaggctttagcctcctctgggacttctagttacactatttggcgtcctgcaccacctcakgtgcattcaccctgcccatgacaccacggtaactcagtaagtgcataaaccatagactgcagttcctcagaaccgcttatctgagacagcatgctggtac

SEQ ID NO: 10470 - DNA, 201 bp, Homo sapiens
cacacagcaccagggtcgcagtttagtcaagaaggctttagcctcctctgggacttctagttacactatttggcgtcctgcaccacctcaggtgcattcaycctgcccatgacaccacggtaactcagtaagtgcataaaccatagactgcagttcctcagaaccgcttatctgagacagcatgctggtacttcctgaatg

SEQ ID NO: 10471 - DNA, 201 bp, Homo sapiens
gattttagataaaaataggttttattactcctttgggcaaagaatgtcattattaaattaaaaaaaaaaggaagcagatcaaaactcagcacctgttctaygacctcattttggaaaatatgggggaacgagtatcatcacgtgaatacatatatataatgcatgtatacatgtagggaattacacacaacaaatttaaca

SEQ ID NO: 10472 - DNA, 201 bp, Homo sapiens
taaaaataaattatgaaagtatctatttcttttactaagcatctagaaatatagaagagagtgtcaagggcacagtcatagagatatattaataaaaaaawgtctgggctgagccaacagcggtaagcggccatccaatcatctcattcactgcatgtcatttttgagcacttattaggttctgcgcaaggtgctgaataa

SEQ ID NO: 10473 - DNA, 201 bp, Homo sapiens
atattaataaaaaaatgtctgggctgagccaacagcggtaagcggccatccaatcatctcattcactgcatgtcatttttgagcacttattaggttctgcrcaaggtgctgaataagatgtggtccctcatgttcaacgaccttacagcccactagcaaagagaagcaggaataaataatacaatttgatacgtgctataa

SEQ ID NO: 10474 - DNA, 201 bp, Homo sapiens
taataaaaaaatgtctgggctgagccaacagcggtaagcggccatccaatcatctcattcactgcatgtcatttttgagcacttattaggttctgcgcaargtgctgaataagatgtggtccctcatgttcaacgaccttacagcccactagcaaagagaagcaggaataaataatacaatttgatacgtgctataatggg

SEQ ID NO: 10475 - DNA, 201 bp, Homo sapiens
gacataaatatttattaaattgcttagagataactacttaaaaacaaaactgggctggagagggtggttcacgcctgtaatcccagcactttgggaggccraggcgggtggatcacctgaggtcagcagttcgagatcagcctggccaacatggtgaaaccccgtctctactaaaaatacaaaaattagccacgcatggtg

SEQ ID NO: 10476 - DNA, 201 bp, Homo sapiens
taaacctttaagaaaatatttatgaagttatacaaagtatgacacctgccatgaggatataaatcatatctatgtatcaacaagagaggggaaggagagcraaggccagtaggatacaaataaaattaaagaattaaaaaaaaagcttacagacttatttgtgcagtctcttgatataaggcaactcatttatctatatcc

SEQ ID NO: 10477 - DNA, 201 bp, Homo sapiens
taaagaattaaaaaaaaagcttacagacttatttgtgcagtctcttgatataaggcaactcatttatctatatccatacccgtatttgccataacacatasagaacctaataatttcccagccatggatactgatgttattataccaaaggatgaatcccaatggctaacattgctggattattaaaccaggttttcgtta

SEQ ID NO: 10478 - DNA, 201 bp, Homo sapiens
aacaaagtcaggtgacacaaaaagaaaagaaaaaaatcgaagttaagacatgggaatgtgctatagagaaaaaatgaggtagcaggatatttaattttttwaaaaaatctgagcagttggttcataagaaaaaagcaccttaaaactttcagaagaaaaccagcacctccaaaaaggattcagagagcaggaagcttctgc

SEQ ID NO: 10479 - DNA, 201 bp, Homo sapiens
ataactttccaccttacgtgctccatcatttcctcttcctcctccatcaaacatcagttcccaaaagagcttgtggaattgcctccactcagggccactamgtagacactggccaaatgaccctttggtatcaatcagaaaaggcacccttccttccttcctcaattgagttaaaatgctgattttgttaaagaatgccat

SEQ ID NO: 10480 - DNA, 201 bp, Homo sapiens
cttaaaaaaaaaatctagaatactttttatgaatgaaactttacattgctgcccagattgcaaacctctgagccaatattccacaaagacatgggaaataytttaaaaggcattatttatatagcacattgattttttcagttgattcaattttattgattttaggaaataatttaatcatctgtatttcatttcagataa

SEQ ID NO: 10481 - DNA, 201 bp, Homo sapiens
caagcaggactgcccatgtaaacactagataaaagctggtatttgtagaattgctttcaacacaagtgaagagtctattaaataaggtcagaagcaaaggkcaccaccagaatgttgagattaccaaggaactgtgcctatattgtaaaagaaaaatctcctaaatttaaagttgctcatcattttccaattacctaaggt

SEQ ID NO: 10482 - DNA, 201 bp, Homo sapiens
ttccagcattccctgtttatcacagccacttacagaaatgcagaaggcttgtaactgtagccagaagccacaaccctaagccaaggcttgttttgttttgytttgttttgttttgtttttaagagagagggtttcattctgtcacccaggctgaaatggccagcaaggaacacatgtcaacataagcttcacaactgggaa

SEQ ID NO: 10483 - DNA, 201 bp, Homo sapiens
ggctaacaccgtgaaaccccgtctctactaaaaacacacaaaaaattagccgggcgtggtggcaggcacctgtagtcccagctactcgggaggctgaggcrggagaatggcgtgaacccaagaggcagagcttgcagtgagccaagatcgcgccactgcactccagcctgggtgacaaagcaagactccatttcaaaaaaa

SEQ ID NO: 10484 - DNA, 201 bp, Homo sapiens
tttctggcatccagttaccagagaaatggaagtaagcaaaaagaatttaggaagaagcaaaatacaagtcagaaaaggccatggaccacacaatcggactyggaaattacatttcttggaattttccctgaagaataaatggtcatatacaaagttttagtcaaaaagatgcagagcaaatcactgatataagagcaagaa

SEQ ID NO: 10485 - DNA, 201 bp, Homo sapiens
ctgaacccattttaatccaattggtacagattaatcacaaattccatacccatcacatacagcatagaattgacaattttatttaaaatgggaaatttccraaaaacttatggtgtaatcttatttttcttgctgcatttaacaaattaccaagtctatataattataaactcagttttaacctctcaggattctttgagg

SEQ ID NO: 10486 - DNA, 201 bp, Homo sapiens
atgccatcactccccagtgaggattaaacaatttctctcccataaaattagcttgaggattaagtgagctaatgcccatgaaagcaatccgtaacctgtcwtgcacaaatacaaacgggaagtatctctgttcttataaaagactgtgcctcctccatctgcctttctccagtgtgccataatgtttggaaaacactgagg

SEQ ID NO: 10487 - DNA, 201 bp, Homo sapiens
agtgaggattaaacaatttctctcccataaaattagcttgaggattaagtgagctaatgcccatgaaagcaatccgtaacctgtcttgcacaaatacaaaygggaagtatctctgttcttataaaagactgtgcctcctccatctgcctttctccagtgtgccataatgtttggaaaacactgaggttttcagttataatt

SEQ ID NO: 10488 - DNA, 201 bp, Homo sapiens
tctccagtgtgccataatgtttggaaaacactgaggttttcagttataattaggaagtacaaactctataattaaatttacttcaagcctcaatcagtaaygggctcattttagtgcttacttagtaggcatggtcctatagccagcactgtactaaatactgtgggagacagaaaagaaaaacaagatttggtccttttg

SEQ ID NO: 10489 - DNA, 201 bp, Homo sapiens
aggactgaagggcaaaccctgcaggtggaacttactttgaaaactaaagggaagaactcattttttattttaattggccaaaagtttgtggaaggcattasagagagagacagcctaaagacaggtataaaggtaggaatgtatctgtaggcccaactagggactcacttgaatagtgaggggttaaaaggagcagaagtt

SEQ ID NO: 10490 - DNA, 201 bp, Homo sapiens
gaatagaataacagttaattatttaatcgacaaatattctgtgaatacctttcctatgggaaccacaaagctaacttcagaaggaaataaaacaaagtttytgctctccaatagctttcagactggccaaaaggaagggtattcatgtatgtccaggtccgaacatacagtgtgaaaagcacctttggggaacaggaacac

SEQ ID NO: 10491 - DNA, 201 bp, Homo sapiens
atggaaaaaataaaccactccatgaaaatgaaccataaagtaaaaagtagttttaaggcatatatatatatatttttaaggcatatatatatatatatatwtttttttttttttgagagatggagttttgctcttgttgcccaggctggagtgcaatggtgcgatctcagctcaccgcaacctctgcctcctgagttcaag

SEQ ID NO: 10492 - DNA, 201 bp, Homo sapiens
ggttgacagttgcctccactgggctcatctatcactctaccttgcacacacctcaagtgctgtccacatcaagctgtatcataatatatatttatataacygactgccaaaaaaacctccataaggaggaaattaatgtcttgttttgtgtctcagtatccagaaaaaaaaaatcactgagtttatccaggcagtagaagg

SEQ ID NO: 10493 - DNA, 201 bp, Homo sapiens
gaggcagaggcgggcggatcatgaggtcaggagatcgagaccatcctggctaacacagtgaaaccccgcctctactaaaaatacaaaaaattagccgggcrtggtggcgggcgcctgtagtcccagctactcgggaggctgaggcgggagaatggcgtgaacccgggaggcggagcttgcagtgagccgagatcgcgccac

SEQ ID NO: 10494 - DNA, 201 bp, Homo sapiens
gaactatgtaattaaaaataaatcaaagaaaaaatgttacatatataccatatatgtatatataaacagatatgtcacatataaatatataacatatatgwtatatatgttatatatgttacatatataacatacgtatatataaacagagatgtatctcttgcatcttttaaaaactaatgtaaaaaattgttacaagaa

SEQ ID NO: 10495 - DNA, 201 bp, Homo sapiens
tgtaattaaaaataaatcaaagaaaaaatgttacatatataccatatatgtatatataaacagatatgtcacatataaatatataacatatatgatatatwtgttatatatgttacatatataacatacgtatatataaacagagatgtatctcttgcatcttttaaaaactaatgtaaaaaattgttacaagaatcaaca

SEQ ID NO: 10496 - DNA, 201 bp, Homo sapiens
atcaaagaaaaaatgttacatatataccatatatgtatatataaacagatatgtcacatataaatatataacatatatgatatatatgttatatatgttayatatataacatacgtatatataaacagagatgtatctcttgcatcttttaaaaactaatgtaaaaaattgttacaagaatcaacaaggggccaggtgcgg

SEQ ID NO: 10497 - DNA, 201 bp, Homo sapiens
aacccaggaggcagagcttgcagtgagccgagatcacaccactgcactccagcctgggtgacagagtgacactctgtctcaaaaaaaaaaaaaaaaaaaawttatgccctagaacagtatattcagtgaaaatatccttcaaacatgaaggagaaataaagactttctcatacaaacaaaagctaaggaatttcatcaaca

SEQ ID NO: 10498 - DNA, 201 bp, Homo sapiens
tgtgaatcactgtgttgttattaagagaaaagcacatgctaaacaaaatatagcggcacagcgaggcaaatgagaggagacgtgctacaagaaacaaattyttgcacgaccaggctatctgcagctttgaggagaagagttggtagtacatgaacccatcacacactagtaacaatagcctctaatttccctctatcactt

SEQ ID NO: 10499 - DNA, 201 bp, Homo sapiens
gtcacgctgctccttccccgaccgatcttgtgatttgatacacatcattccttaaaaggaagggacatctgagagggcaccccttttacttacttctcaaygctgccggtcagatttccaaagactacgggaaatgggagggccaatgtgactactgagattgccacaccttacacacagtcaggcaaaggatgcctagca

SEQ ID NO: 10500 - DNA, 201 bp, Homo sapiens
aaagactgaaatatctgttccctgtagaaacaggtctgtagataagaaaggggcagaaatggaagaggaagcaggcatggagggaagagcttgcagcctarggacataattaggatgtcagaacaatccagaagtgcccagtggatgacttggttgtcctttctctccatgtttcctgttttggtaaacccaaagggttta

SEQ ID NO: 10501 - DNA, 201 bp, Homo sapiens
gtctcggatgaaaggaaatgtaccaggcataatctaatcttttaagaatgttcagcttcatcattaaatccttctgctatttggctcaagatgattctatrcccagccacctggatggtttaggtaatgttattatagggcttgggtgaagaatgctggctaagatgaaaagctgatagatattaaactatgtttatttgc

SEQ ID NO: 10502 - DNA, 201 bp, Homo sapiens
tttatatgtagtttaagaaacattttatgtcacattctggttttttttacatataattcatttatttttcaacaattacttatgaacaatcttttttcttyttgtttatttttgtttgtttgtttgttttgagacagggtcttgctttgctgcccaggctggagtgcagtggcatgatcatggctcactgcagacttgacc

SEQ ID NO: 10503 - DNA, 201 bp, Homo sapiens
atgtgctacagtgcccagctaattaaaaaaataattgtagagataagctctatgttgccaaggctggtcttcaattcctgggcccaaacaatcctcccacyttagcctcccaaaatgctgggattataggcctgaacattatcatcttaaacagtgtctctggaagtacccaaatcttttgtgttaccactcattctgagc

SEQ ID NO: 10504 - DNA, 201 bp, Homo sapiens
gaggactagttgagcttgctggtactaagcgagagttagggattcagggtgtctgggatttggagcgttggaacatgaccaggggaatgacagaaagccargagggtgttgttatgaggcactgcaaagaggtgaatgaaagcaggggcaagttgcagtgaacacagacagtaaaagcaaggtggtaagccactttctcca

SEQ ID NO: 10505 - DNA, 201 bp, Homo sapiens
cacaaaatacaatttaaaaataattttacatggaaatcaaaaggaactactttgctgttcatggttctatccactaaatgcccaagattaaggaaaaccaraatgtcaacttgtgactggctttaacaccatgaagggtctatgttaacagaggatgaaaaacatgataaaataatgctccaaataatagctaacaatagg

SEQ ID NO: 10506 - DNA, 201 bp, Homo sapiens
gaatgatgtattagcctggccacttctatccttgctgctctccagtctgttctcaatgcagtagccaaagtaactgtaggaaaggtaaatcagggctgggygtggcagctcatgcctgtaatcctaacactttgggaggccaaggcgggtggactgcctgagctcaggagttggagaccactctaggcaacatggtgaaac

SEQ ID NO: 10507 - DNA, 201 bp, Homo sapiens
tagggaacagaactcttagagcattgtatgtgctcaattttcattaatgatgcttataatgacaatctttggtcatcagaaagattaaattacatctaacrtaagaggagaagagtgaaacacattcaaaacgattctcatccattgttagcattcaaataaaggcttcgaggtttaaaaaggtcttcagctgtccagaaa

SEQ ID NO: 10508 - DNA, 201 bp, Homo sapiens
cgcaaagctttcgcattcagcttgaggagctaaaccatttcaagccaaggtaggaaacgccaaagtggtgccgaagtggtcccaaagcagaaggctgggargcagggcaagctcagcgcacctagacgtttgcatttacacaaagaaattagccgcatgattaatgggagctgccggctggaggcggggcgcccgtgccgg

SEQ ID NO: 10509 - DNA, 201 bp, Homo sapiens
atacgatggggtcccccaggaccccctaaacaacaaatgctcaaaggagcgacggattaattggggcacccagactccccagagcaatgaaaaaagtgccyagagcatcagtagagcacggcgctgaaagttttagagatcgtcgccccctcgccccttgcagctctatcccctccattctctatagctgattcctcagcc

SEQ ID NO: 10510 - DNA, 201 bp, Homo sapiens
ccaaaatccacattatatacactatcccaggacgcaaatctggatttagagcccgagctgtactgctttctagcaacatgaccttggataaattctctacrgttcagtttccatgatacgaaataagaaatttttttggggtggggggtggacggagtctcgctctgtcgctcaggctggagtgcagtggcgcgatctcag

SEQ ID NO: 10511 - DNA, 201 bp, Homo sapiens
ggccgccacgcccggctaattttttttgtatttttagtacagacagggtttcaccgtgttagccagaatggtctagatcttctgacctcgtgatccgcccrcctcggcctcccaaaatgctaggattacaggcattagccgccgtgcctggccataagaagtaatttctaactaatagggttgttgtcaggatcaaatggt

SEQ ID NO: 10512 - DNA, 201 bp, Homo sapiens
tttctatcctgtctttctggtggtgaaaagatcaggaaggatttgccagcattacttgtaacaggcataagagtcacatgaaaaaagatctgcttttttcyttttttttttttttttttttttttgagccagagtcttactcttgtcacctaggctggagtgcaatggtgcgatcttggctcactgcaacctccgcctccc

SEQ ID NO: 10513 - DNA, 201 bp, Homo sapiens
attgctatatcccagaaccagaacagtgccttgtatgtgttaggtgtttaatatatatctgtttaacgaatgaatgaataattgatgaacaaaaccaaackataacaaatataaaattttcaatgaattgtttgctttcccttcacaattacaaaaaaaaagttttagtggcttgattcaagttgtcagaatctcttaaaa

SEQ ID NO: 10514 - DNA, 201 bp, Homo sapiens
ttctctccttttgagttgctttacgagggagatcttacctgaccactctatataaaaatatgaaactcctccaaaccagacttgcctgagtttccccattraaatgtaaactccataaaggcaggaactttgtcttcttaattgctatatcccagaaccagaacagtgccttgtatgtgttaggtgtttaatatatatctg

SEQ ID NO: 10515 - DNA, 201 bp, Homo sapiens
ccatcaggctcagaataaaaatgctttagagtagctggtaaagatcctgaagtaactaaataaaaaagggaagcccagcatcacttactaatgaagatgtrcaattgcagttgatcagttgttcaagaactgtaaattatgtggacatcataaatgaagagagaagaatataaaaatgtcagcaatatgttataactaact

SEQ ID NO: 10516 - DNA, 201 bp, Homo sapiens
aaggagacaggaaggaggagagtaaagaatttcaaaatattctggctgtggactcctttggctgttaaaaaggctggagatccaaaaaaggaaacagtgamagaagattctaaaacagaacaggtaactgaggctgttccaccctggtgtcccactagagcttttctctcttcagtgggtgcattctgacatgtgaagatc

SEQ ID NO: 10517 - DNA, 201 bp, Homo sapiens
tgataaccccatgatgccccatacatagcactgttacttaggatccttagaattccttatgtgttatatccagtcctgagcattaacttactgtggatcaraaaaggaagcaaaagcagagatagttttcttggttgttcaactttacatgtggtttcaggtcatgatcataaaataattcaagtttatttttcaatctac

SEQ ID NO: 10518 - DNA, 201 bp, Homo sapiens
tttcactaaacaggctgccaatgtcattctgaattgttttttccttaataaaatgccctagcagttcaggtcccatttcttaaatggtcataggcattccktagatgacagagaggtgagagataatttaacctattttaacgtatgaataaagttacaattacttactaattcctagtcttatcagctttagctatataa

SEQ ID NO: 10519 - DNA, 201 bp, Homo sapiens
taaagctaaatgcctctaagcatacattaggcatggttctaggactcctgcatgaccttcagagtgatctcaaacaccacactttgcaagccacttatacrcaccaagatcttcaacattttgtgtttggcttgactacttcctgtctctttctttgttgtgaaaaactgattggctttcagtgcccttggaacagctcac

SEQ ID NO: 10520 - DNA, 201 bp, Homo sapiens
catctgtaatggcccttgccagacactgaatctactggcaccttgattgtagatttcttagactccagaactgtcagctgtcatttataaaccacagagtstatggtattttgttggagcagcctaaacagactaaaacacctaccaacattcccttaagtgcattttaagtgccttaaacatacactcctttagatactc

SEQ ID NO: 10521 - DNA, 201 bp, Homo sapiens
ttaggttgctgcaaaagtaattgaggtttttgctattatttttgatggcaaaagagggcagaaaattagactaggataagttaaagatggatacaaatcargggtacacctagaaagctaaaatgatatgctccgagatgttacacgcaatttgagagactgtaggaaaagcttgagatactgatgagccaggatttcccc

SEQ ID NO: 10522 - DNA, 201 bp, Homo sapiens
tcatgacctctgtggttccaatcggggattctttctattacactgccctacagaaaaaatcttcatgaggacagtcatatgtatacgtatacgtatatgtrtatgtatatgtatatgtatatgtatatgtatatgtatatgtatatgtgtaaaaccgtgtccccaaatcagctctacaaagggaaaggcttaacacacact

SEQ ID NO: 10523 - DNA, 201 bp, Homo sapiens
aaaagggccatacaaatattattattagtgagcaacctcataagtccaaaatcctgacacaattgcacatcccagcacaaggacctttccagttcatagayggagttgtgcttaagaaaatacactgttgctcacaagtttgtttcttctttgcccacacttagtttttctggcacatggaatgatatattatgaggagct

SEQ ID NO: 10524 - DNA, 201 bp, Homo sapiens
gcgcttttctattgattttttaacatttctatactgttagaaattttactgataggtatacataaacttttattcagaagaagatttttttaatgcaaagwtgcttttagagttgtacaacaagcagaaatgattttcaaatttttttctttattcctctgtggaaccagccttttgttcaaacaaaatactatcagaagt

SEQ ID NO: 10525 - DNA, 201 bp, Homo sapiens
gggaagaagcacatatatgaattttgaaattaagtgttccattttagacttactaaatttgagttcagatgagatgtgcattgactgtgagtctgaaactyagggaagagacctactgtgcagattaaaatctgggagaacctgtagagaaatgataagtgaagcaatgggaatggctgagactccccacgtgggctgggt

SEQ ID NO: 10526 - DNA, 201 bp, Homo sapiens
agcccattttcatgctgctgataaagaaatacctgagactgggtaatttatacaggaagaagagtttaatggacttacagttccaagtggctggggaggcmtcataatcatggcggaaggtgaggaagagcaagtcatgtcttacatggatggcagcaggcaaaaaaagcttccggagggaaactctcctttataaaacca

SEQ ID NO: 10527 - DNA, 201 bp, Homo sapiens
catgctgctgataaagaaatacctgagactgggtaatttatacaggaagaagagtttaatggacttacagttccaagtggctggggaggcctcataatcakggcggaaggtgaggaagagcaagtcatgtcttacatggatggcagcaggcaaaaaaagcttccggagggaaactctcctttataaaaccatcagatctcg

SEQ ID NO: 10528 - DNA, 201 bp, Homo sapiens
tctatcattggtgatggcatttctttaaaggtgttgtatgttttagaagacttaaacttgcaccaatgtggaatatggctcctagatgggtctcactttcrgagttgagaatatcacaaggaaactgatcccatggtaaggaaaggaattggagggagagaaacacatgctgaagacactatttaactaagtctgctgaac

SEQ ID NO: 10529 - DNA, 201 bp, Homo sapiens
aatcctaaattatagtcttatgactgtgtgtgtgtgtgtgtgtgtgtgtgtgtgtgtgaaagaaacaagagaatacctttaatgatagaaaaaaaaaattyggcaacaaaaaccagtctacatgtaggtaagccaaaacccacgttgttactcaatacaaaatctggaaagaatcaggttctaccatatcttggtgagaag

SEQ ID NO: 10530 - DNA, 201 bp, Homo sapiens
tctcggctaccaccaatgttctttgcttatattatataagcacttttgcaatgcccccacagtactccactcagtcatggttggccaaaaaacatttgatscacaaattcttaattagggatgatgtgtgtcagtaatttaatctttttttttttttttctttttgggacggcatctcactctgctgcccaggctggagtg

SEQ ID NO: 10531 - DNA, 201 bp, Homo sapiens
ttctccaggctcagagggtttctgggttgtgcgttattgcacagatcacttatgttctcagtcacattccctaggcagcgtttgttttctgtaaacccctmtctctctttttccttccccatctccatcactctctgtgaggtatcctgggtcttcctcaatcaaacctgctctgagaaaagggctcatgatttttaccct

SEQ ID NO: 10532 - DNA, 201 bp, Homo sapiens
tatgatgggtgttatgatagaagcctttttggttctgagaagacgtcagaaaaggcaacccagtattgtgccttgatgataaggaaggatttagctgacasaacgggggtgaaagggaaaaccaggaagagggtaacatatacatcaatggttggaggtttgagaaaacaggtctcctgtgaaaaagatccccctaatcag

SEQ ID NO: 10533 - DNA, 201 bp, Homo sapiens
gttctcaaaaacaattaaaacacattcccagtgggggagtcacatattttaggattcaagccataaagtacatgtcttctttgagtatgaaaatcagcaarttaacataaaaggggccactgtaaacatgcctaaaaaaacacatggcttcaaaggatcaaccagtacatgattccacatttagacccaataaggaggaaa

SEQ ID NO: 10534 - DNA, 201 bp, Homo sapiens
tacatatgatctatatattcccctcttggcattagtatctaagaaaaataaaagcattatgtccatacaaagaattatatttgaatgttcatagaagcttyatttgcaatagccaaaaactagtggcaacctgaaagtccatcaacaggttaacgggtaaacaaattgtgctatctccacacatggaacgataatcagcga

SEQ ID NO: 10535 - DNA, 201 bp, Homo sapiens
tacaaaaaacaatatatgctatgtgatgcacatcaaattctaaaaaaatacaaactcatctccagtctgaaagcagaacagtggttgctgagggttgttgygcaaggcggaacaaagcaacaggaaggagcatgatggagggattaccaaggggcacaaaaacttttagggatgatattggatatgtttattatcctgatt

SEQ ID NO: 10536 - DNA, 201 bp, Homo sapiens
tggggtctgcatcaggacccctttcctgcaacaacagtacctgccaaaacagactgtgtgcatctcctttcagaagttcaacggtatccccggcctggagstgtaaagggggtccttcatgcagagctgggggtggtgttccagaatagttcctaatgacctgcatctttggtaaacctgaaaataagccaaacaagtttt

SEQ ID NO: 10537 - DNA, 201 bp, Homo sapiens
gcatcaggacccctttcctgcaacaacagtacctgccaaaacagactgtgtgcatctcctttcagaagttcaacggtatccccggcctggagctgtaaagrgggtccttcatgcagagctgggggtggtgttccagaatagttcctaatgacctgcatctttggtaaacctgaaaataagccaaacaagttttagaattga

SEQ ID NO: 10538 - DNA, 201 bp, Homo sapiens
aatctcttttttagttgaaaaaatatttctccttcagctgatgcctgcttcataaaaaacacatcacgtacagtttaatggaaaagaatcaattttttcaycaactctatcctttctgcctattactttcctcttgggcactggctgatttcatcactgaggaggctcatcctttctgtgtatgtatcacattgcccagta

SEQ ID NO: 10539 - DNA, 201 bp, Homo sapiens
caatcatcaataaaattcttaacacaatctactgccacagaaggcatcacacttcacaaatgagatcaagaacggagaataaattagatttacagatgttyatatttcgaacagtcatttagtattaatttaatataggttttcttctccccttagaaaatatgcctctgataggtttttaacctctgtttaaaaatgtcc

SEQ ID NO: 10540 - DNA, 201 bp, Homo sapiens
acattattctgctcatctgactacacccaagtaattcagggctggtgattaacttaactcaaagactgcaataaataggcttaacatgtgagacaccagcrgctgaagaggaggccaagagagacagtctaaaggagcagcactcattgaagaatatttgctcttacagaacatggaagcaggaggcagatatctaagtca

SEQ ID NO: 10541 - DNA, 201 bp, Homo sapiens
attaacatactttaccttcttcctggcatatacttactgatgtctgaatattcagctcatccaccaacccaagggaaaaaataatctgaactactattctyactccttaaaactcatatataatttctactaataaacccattgctatagactaaatgtttatgtacccccaaatacatatgttgacacgtaattcccaac

SEQ ID NO: 10542 - DNA, 201 bp, Homo sapiens
tttcccaatttgttttgctttcttgtatgtattgtgtaatcctagatctttttatatgtttattaaacaattcactaattgtttttaagacactgctataygtaataaatctgcacaaaaatagtatataatatttaaaaattttatatgtacatttatatacatgcatttatgcaatcagaactttgtgtctatatctat

SEQ ID NO: 10543 - DNA, 201 bp, Homo sapiens
accacccccagctattttttttttgcttgtatttttagtagagatggggtttcaccgtgttagccaggatggtctccatctcctgacctcgtgatccgccsgccttgacctcccaaagtgctgggattacaggcgtgagccactgcacccagccacgtatgttcttacaaacataaatacaacagcacttctcttgtaagt

SEQ ID NO: 10544 - DNA, 201 bp, Homo sapiens
ccagattattttccagcaaagctactctatttctcatgttccccttggtttatcatcaagttcgtgtatttggaatcctttaactgtgaataccttttacwcacaacaaaaggatcacatacataaaaaatctttggtaattaaactgtggaaagaaggcattgcataatggatgaaaaataattatactaacataatgac

SEQ ID NO: 10545 - DNA, 201 bp, Homo sapiens
aacaaaaggatcacatacataaaaaatctttggtaattaaactgtggaaagaaggcattgcataatggatgaaaaataattatactaacataatgacaggrcaaatctcacaatgctaaatagaaaacaactgaacgttttctgcagacaaataattggtctccggagaggaaacttgtcacaaagtccccaaaaaacatg

SEQ ID NO: 10546 - DNA, 201 bp, Homo sapiens
atggatatagaattaagaaattttctctgatggagggtgggtaccagttgtctggtttatgctctcccctacttacttagaaaacagtgatttttaagtgscagctagctggctggttttcttactagatttacaaaggaacacagggagggtgctggatatgtgagcattaaccaggcaccctgaggctgttcagtaagc

SEQ ID NO: 10547 - DNA, 201 bp, Homo sapiens
aacatggatttgtaaaagactgctaggatcattaaaatcagcattgaagctatgttgagcaagatggatagctgcactagaaaagctgtaacaagagtcaytgtgaatgaaaggaaaattttgctctagatttgttggtagccaaggcacaaaaattggaagcataatgagttacagactcatgtctgataatatgaaaga

SEQ ID NO: 10548 - DNA, 201 bp, Homo sapiens
tacaatctgaaagttgtcttatactattattcagctgcttcagacattcttttattcaataagtgtttattaaatgcctgatgagtaccaagcattgtacygggacaaaaaatacatggcctctggccttacagttctttcaatctaggatgaagatagagacatgaaaagaagtaaacctaataaagtgattcccaaagg

SEQ ID NO: 10549 - DNA, 201 bp, Homo sapiens
ctcacagaagataaacaaatcactccaaagtagaatttcattaaactctgcttaggtttgatcctcacacaagctacaggaattccgccagaaagtcctcygtgctccggcagaggcgctctgcagatacttttcatggagaggtgtggaccgccaatggccagctggctcatttcagttttcccagtcatgtctcagaac

SEQ ID NO: 10550 - DNA, 201 bp, Homo sapiens
atccactggaggttggttgagtcttcctcctctgtcccaaatccactggctcctggacagggaattggcagattttcatgacaaagatatagagcaaagartcagacccccattttagggaaaggtactcactaacacaagatctgttctaaatgaagaggaatcaccagggattaaaggacctggttcctttaatagtct

SEQ ID NO: 10551 - DNA, 201 bp, Homo sapiens
acaacaaactctctaaagaaaagaatggaaaaggatgtcctacgacatggtgcactgaaggggcatgggtacggaatccctgttctgtgatgagctgtgtsgttcaggcaagttacttacatttctggtcctgaattttctcatttgctaaaacaggataaactgctccatcataattttgtgattatttaacaagatgag

SEQ ID NO: 10552 - DNA, 201 bp, Homo sapiens
ctgtgccaaaaattctactcttttcaggcagccagcatatcacatgtttcataaaaaccagaggatccatcaaaataataaataagctttaaataattacyagttatattaaaagcagagtttcacattgacttatggattaatttaatactgaagacatttgaggagactaggtttttcaaataaatcagtgtgtgagaa

SEQ ID NO: 10553 - DNA, 201 bp, Homo sapiens
ctttgtagccagtgcagagaaccccactaagtcctgcttggatcctctctcccttagaatgtgaatgtgagctggacacagaaaaatggctgtgatggccrgagacagaaatatggagcactgaataaagaaggtaaaaaacaaatttgatccatttccatgaaaccaggctgagtagagactgttttgctttatttccta

SEQ ID NO: 10554 - DNA, 201 bp, Homo sapiens
ttctggaataatcagtacagtatccagacccttgaattaactacattgctttactttagcatgcatcttatcctaatatatcactgttagaaagctatggrgtgaaatctgcctctgattctactttacactgtggtcccagcatatatcactacttaataacaagaaaaatagcaatagcagtactacggttatgtcttt

SEQ ID NO: 10555 - DNA, 201 bp, Homo sapiens
cactacttaataacaagaaaaatagcaatagcagtactacggttatgtcttttattattgctattctattatgtattttatatagcaatgcattttactcyttgaggatattttctataataactatgatgtatctacaaaatcagaatgcattttctattccttttcccccaccaaaaaccagaaaaatgacaacccctc

SEQ ID NO: 10556 - DNA, 201 bp, Homo sapiens
gattcttaaatcctctttgtggggattctgacctgccactggaaacatccattcaagaatttttacaaaagaaaacatctccaaggacactaagaagactrttttcctgcaatatattaatttctaacttgttaccacaaaataataggaaattctgagatacattaactcccagaaacagacatagctagtaacaatacc

SEQ ID NO: 10557 - DNA, 201 bp, Homo sapiens
atacctgcaggtcaataggccaacaatcaactagagtaaatccatgtcatgaattttctttctttccctttgtctatcctttggtgagtaagaagagtggyatctgtaaagaaatgaaaatcatcctggatagcataaataagagctactttgtgaggcaggtgggaaaggtagacaaagggttctgcaaatctgctttag

SEQ ID NO: 10558 - DNA, 201 bp, Homo sapiens
agagtaaatccatgtcatgaattttctttctttccctttgtctatcctttggtgagtaagaagagtggcatctgtaaagaaatgaaaatcatcctggatarcataaataagagctactttgtgaggcaggtgggaaaggtagacaaagggttctgcaaatctgctttagaagggtggcttatattccagaagctaggaagg

SEQ ID NO: 10559 - DNA, 201 bp, Homo sapiens
atgtccttagcacctcctctatgggcaaagcaaagcagtacagccagataagatcaacaaaacatttctatgtcaggaagactgtaaactatgggaaatasatttccattgttcaagagagtagagtatctatataggttaaatggatccaaattatagtttgtgctgtccttggtaacaatcataaatttaagaagtatt

SEQ ID NO: 10560 - DNA, 201 bp, Homo sapiens
cccttccaccctcactctgcccactctccacacactcccatgttcagccacacccaactgctttgcctgctgtgctccagacagactccaggccaacacayagaaattccagcagagcacaaaattcacatgactataatttacagatgcaatttcaaaattaacactttcccactaaagagcaagcagaaaaaagcaaac

SEQ ID NO: 10561 - DNA, 201 bp, Homo sapiens
gaaagacagtaagaaactttcctcatacactgttttaccatcccccggtccaaatagcaaagtagataaaacctggaactcatccatgcagttagctgccygaaagcacagttttctagatagaaatattccctgctctgcctaaatttatgctggtctgttagagtgtgttaaacttagtacgcaaatgataaagaattg

SEQ ID NO: 10562 - DNA, 201 bp, Homo sapiens
gaaatgtagtttctggaccagagctagtcaacagaaatgtgtaagtcacatacataacttaatattttaaaagccatgttagaaaaatatacaaccaggtraaaataattttaatcatatattttatttaattcaagatacctagaatattatcatttcaacatgtaaccaatataaaatcaagatgttttagtatttttt

SEQ ID NO: 10563 - DNA, 201 bp, Homo sapiens
agatgctgagttctatacatcgatagtctcaccaaagtttgagggccagtgtgtggcaaaaatggacaccaaaatatatacctcctaactctgggcatgtytgctgtgatttggctgcatttatcaaacttgacaagttacagtaatgacttcccatgtatcttaagatggtgtagattcagattgccaatagccttgtgt

SEQ ID NO: 10564 - DNA, 201 bp, Homo sapiens
ggcttaaatagaatagctttttgaaaccctgaggtccaagagaatcagcttgtttttttccattctttaactcagcaaataattattgagtgcttatgatyatcaggcactaggttaagtgattagtattatataatctcacaaaacccatgatttctgtattttcattttgaaatgagaaccttctaagggtcagagaag

SEQ ID NO: 10565 - DNA, 201 bp, Homo sapiens
agatccatgtgagtaggacatgccacatcaagttggctgccctgaactggtatcaggcaagatccacaaatctgggctggcccaggagtagcctggtttcyactgaggaatttgacactatttgtggtttgtgtgtgctgtaccacccatgggccagtactaataaaacaggattatggaaattagcttgattcatcattt

SEQ ID NO: 10566 - DNA, 201 bp, Homo sapiens
aagttggctgccctgaactggtatcaggcaagatccacaaatctgggctggcccaggagtagcctggtttccactgaggaatttgacactatttgtggttkgtgtgtgctgtaccacccatgggccagtactaataaaacaggattatggaaattagcttgattcatcattttttcccttcatcttgcttttgcccttttc

SEQ ID NO: 10567 - DNA, 201 bp, Homo sapiens
caactgtagttgaattacatagctattttttgaaactgtgataaaatctactgctttaggactctgttacttgtggccttaaaatcctaaaaggaatttcyaccttaggagccctggaagacttctttttctgggtcttgggtattttgcaacgaacaaggagcatttttcagtcattagctcctctgactgtatgtggtt

SEQ ID NO: 10568 - DNA, 201 bp, Homo sapiens
ggttatttcccccagagaatacttgataacaacctgaatcaagagggaaaaccccctacaggggcagcccagactcaaacatttatatccagttataaacrtttgcataagtcgttagggctttaatagtttagaaacagaaatgtgagctgatgtgaagagccctatataaagaatatatgaatccttttgatttggcca

SEQ ID NO: 10569 - DNA, 201 bp, Homo sapiens
tacttgataacaacctgaatcaagagggaaaaccccctacaggggcagcccagactcaaacatttatatccagttataaacatttgcataagtcgttaggkctttaatagtttagaaacagaaatgtgagctgatgtgaagagccctatataaagaatatatgaatccttttgatttggccagagggacattttgactttc

SEQ ID NO: 10570 - DNA, 201 bp, Homo sapiens
gacattttgactttcctgtttcaaaacaaccattctgatgaggccaggtcaaaagtgctgagcttattagaaagtaatggaccgaaagatatcccccatcmaattcctgattcccatactgatctcacctcattgctaacgcccatcccattaaatcctaattctcagagttgaagaagattgggtaaaagctcaagagtg

SEQ ID NO: 10571 - DNA, 201 bp, Homo sapiens
gaggccaggtcaaaagtgctgagcttattagaaagtaatggaccgaaagatatcccccatccaattcctgattcccatactgatctcacctcattgctaaygcccatcccattaaatcctaattctcagagttgaagaagattgggtaaaagctcaagagtggggtgactgattacttgaattacagcaaagtaaaacaga

SEQ ID NO: 10572 - DNA, 201 bp, Homo sapiens
gctttcttataacactagtttgcctcttagtaattcttaatcttggagaagttatgattttattttcatttcatccttcacttaaatatttattgagtatytgcatatgccataaattctactaggtgtcagggatgaaagggcaagggaaagatgtaatccctttccttagggagttatcaataccctggaaaagagaga

SEQ ID NO: 10573 - DNA, 201 bp, Homo sapiens
gttcaagatggtctcttggccttcccccactctgtacaaaggacgatgcctgtgtaaaaataggaggggtgttctcacacctgaccactgctcaaggtggytcctgctcccacacaccccttcccaattcccaggcaggtggctgtttgtgcctccaataagcaggatgttcaagaagaacatgcaccgaggccaggcgtg

SEQ ID NO: 10574 - DNA, 201 bp, Homo sapiens
gtggtggctcatgcctgtaatcctagcactttgggaggctgaggtgggcggatcatgaggtcaggagatcgagaccattctggctaacacagtgtaaaccycatctctactaaaaatacaaaaaattagccgggcgtggtggtgggcacctgtagtcccagctactcaggaggctgaggcaggagaatggcgtgaacccag

SEQ ID NO: 10575 - DNA, 201 bp, Homo sapiens
caattggcatatacctcaacttaaatatttaacttttctttatgctgggaatgttcaaattattctcttccagccatcttgaaatgtacatagagtcatgytaactacagtcactttagtgatctatcacaggctaagatttattttttctatcaaattgtatatctgtagccattagccaacttctcttcatccctccct

SEQ ID NO: 10576 - DNA, 201 bp, Homo sapiens
attttctgtgcttggctcacttcacttaacataatgatctccagtcccatccatgttgcaacaaatgacaggatgtcattctttatggttgaataatattscattgtgtacatatatcacattttcattacctattcatctattgttggcatttaggtcgattccatattttggtgtttgtgaatagtgctacactaaaca

SEQ ID NO: 10577 - DNA, 201 bp, Homo sapiens
cagttttctatattagttttaccatttacattcccaccaacagtatatgagggttccattttctccatatcctcaccagcatccattattccctgcccttkttataaaagccattgtaactggagtgagatgatggttcattgtggttttaatttgcttttctgtgattattagtgatgctgaacattttttcgtataaat

SEQ ID NO: 10578 - DNA, 201 bp, Homo sapiens
tgcccttgttataaaagccattgtaactggagtgagatgatggttcattgtggttttaatttgcttttctgtgattattagtgatgctgaacattttttcrtataaatattagccatctgtatgtcttctgagaaatttttactcagatattctacctattttttgtaatttcaactcatattttagattcaggaggtata

SEQ ID NO: 10579 - DNA, 201 bp, Homo sapiens
aatctcttgttatatggatagtttgcaaatattttttctcattctgtgagttgtctcttcactttgttgattgttatctttgctgtgtagaaacattttgyctttatataatcctatttgtctatctttgctttggctgcctgtgcttttgagatcttacacaaaaaatatttgcccagacttatgttctggagcatttcc

SEQ ID NO: 10580 - DNA, 201 bp, Homo sapiens
agtttgcaaatattttttctcattctgtgagttgtctcttcactttgttgattgttatctttgctgtgtagaaacattttgcctttatataatcctatttstctatctttgctttggctgcctgtgcttttgagatcttacacaaaaaatatttgcccagacttatgttctggagcatttccccagtgttttcttcgagta

SEQ ID NO: 10581 - DNA, 201 bp, Homo sapiens
catgtttgtttccatgccatgctgatttggttactatatttttgtagtatatttggaagtcagatactgtgatgcctccagctttgtagttgttgctcagrattgctttagctattcaaggtcatttggggttccagataaaatttagaacatttttctatttctgtgaagaatatcactgatattttgataaggactgca

SEQ ID NO: 10582 - DNA, 201 bp, Homo sapiens
taagtatactagaatcccaaatgcaattattattaataataatagcaataataataggtatcacctattgttcaatatcacatagctgtagctgctattgyactatttggctagctctctgctgatacatattacctagaatttgaaataaatatcattcctattttacagatgaggaaactgaggctgtgagaggttaaa

SEQ ID NO: 10583 - DNA, 201 bp, Homo sapiens
acctataatgacctgttcttggttattacgtctcagaatgccattccttttgaaacagggttgatttattttctacctctttgttgagcttcctcctcagyggaactaaaagccacttaaagaaatcaagcccttaaagcattccttaaatacacgaagcattttagccaagattcaaataagcgagttaaaacagaataa

SEQ ID NO: 10584 - DNA, 201 bp, Homo sapiens
cataccaccatgcctggctaatctttgtatttttagtagagatggggtttcaccatgttggccaggctggtttcaaactcctgacctcaaatcatccactygccccagcctcccaaagtgttgggattacaggcatgagccactgtgccaggccagtaatttaatctgatagcatttatttacagaagacaaggacatttc

SEQ ID NO: 10585 - DNA, 201 bp, Homo sapiens
aatctttttttttttttttctttttgggacggcatctcactctgctgcccaggctggagtgcaatggcgcgatctctggatctctgctcactgcaacctcygcctcccgggctcaagtaattcttctgcctcagtctcccgagtagctgggattacaggcacataccaccatgcctggctaatctttgtatttttagtaga

SEQ ID NO: 10586 - DNA, 201 bp, Homo sapiens
gggtgtggtgttgcgtgcctataatcacagctactcaggaggctgaggcaggagaatcacttgaacccaggaggtggaggttgcactgagctgagatcgcrccactgtactctaggctgggcgacagagcaagactccatctcaaaaaaaaaaaaaaatgcttcttgttgatatggctgactactgaatagagaaaaagtt

SEQ ID NO: 10587 - DNA, 201 bp, Homo sapiens
ttggagctaaatcatcatgatagcctaagcaggaatcactgatactaaaaataaaagaaaaaaaaaatcacacttctacaaaaggccacagcgtggtttcmttatagctgagatcattttgtggtaacatatattaactaattctctaggcctaagtcatcttatttgtgctgtaggacaggggtcactaactacagccca

SEQ ID NO: 10588 - DNA, 201 bp, Homo sapiens
gcatgtgtgctttttattgtgagtgacttcaaattccttctggaagtagatggggaataaattagaaagaaacactgtgcctcagattaaatgtgatttgyggagcttaacggctacattctcactccctgctccatcccaacagtgaaggtcctctcagggctcattctgggaaatgcaaagctcaggcaggggctgccg

SEQ ID NO: 10589 - DNA, 201 bp, Homo sapiens
ctccctgctccatcccaacagtgaaggtcctctcagggctcattctgggaaatgcaaagctcaggcaggggctgccgctccggatgaccaacaggatagtrcatcctggtcccagagtccctccagagctctagaatctccatcccccattctcattctcttcgtcccactaccattagtccttgtgtttaaaagataaac

SEQ ID NO: 10590 - DNA, 201 bp, Homo sapiens
tttcagtagacaggcctgacctctatgctattttcccttaggtaagccatgtagaactgtgccaggcacttattacacagtcgagaaatcttagatattcrcagtagtgatggcatatgcatctcaaagagtctttcttcattcaagggggtaaatgagaattgttagaatttcaaaaactgggccaaggtcggtcagaag

SEQ ID NO: 10591 - DNA, 201 bp, Homo sapiens
aatgtgaataggtcagcaccatgagactctcagcacagcccagaggcaactgatggtgccggcatggattctgcacccataaacaaattcttcacattaawaactggtcatgcaagcattttaaggaggaagaatgtgaggtttttagagaaaataatttctcaacaaaaaacaatccaaaagggctgacaaatatacaga

SEQ ID NO: 10592 - DNA, 201 bp, Homo sapiens
ctgttataaagcctcagggaaacaaacactaattcagcttactaattttatttgcatttagttttaaccagggtaatgcttatttgctgatggaaatttcratatcatcctttgctcttcctcctgcctgtgacttctccttcctcataagcatgttcaagaatgccaagaagtatcaaatacatattaaacataaccaga

SEQ ID NO: 10593 - DNA, 201 bp, Homo sapiens
aagttattaagaacctaagcaactgactttttctgttgttgtttcaaattgtaaatgagaaaataatccaaagtaatcctttctgaatgttctggatataytaatagcagataaggttttgagggctcatattggctatgacaatatctgaaactaaatttataaatgagtaggaaagccaggagacttaccatgaaacaa

SEQ ID NO: 10594 - DNA, 201 bp, Homo sapiens
agcactgtggaaacaaaaattaccaagcagctggtaaagaaaagtctttaatatacaagaaaaagttattaagaacctaagcaactgactttttctgttgytgtttcaaattgtaaatgagaaaataatccaaagtaatcctttctgaatgttctggatatattaatagcagataaggttttgagggctcatattggctat

SEQ ID NO: 10595 - DNA, 201 bp, Homo sapiens
cattaacatcttactgcttgactttttaactaagtatttaagattggaagtcatagagcacaacactaaaatcaaagattctggaatctgatggaattggsttcaacaccagttttcttgtcagctttttttttttttttttgagtcagagtctcgctctgtcgcccaggctggacagcagtggcgcgatctcggctcact

SEQ ID NO: 10596 - DNA, 201 bp, Homo sapiens
attataatacacatacacaccttcagaagaaacagtgagtctaatatattaactatattaggcagtatttgggcatcaaaaataatacctgatgacttacyttttctattgactccaaagtttctgtatatttttcttctgtctgcttaatttctgctagacaacaacttcgtatatcattttctggacatttctgcagtt

SEQ ID NO: 10597 - DNA, 201 bp, Homo sapiens
cttccccacccctgtaatcttcaccattcatgcagtttctcatgccaaaacctacagtcatccttgactcctctctttttttcacatcctttacttaattsatcatccaatccggttggttctatgtttaaaatttactcagaatctgaccacctataccaccatttttgtcatctcgattaacacaattttcttctaatt

SEQ ID NO: 10598 - DNA, 201 bp, Homo sapiens
cttccctaacatgcattcactagggtgatctcacttagtcccagggccttaatgccattgtgtgatgataatggcccaatctatttgtcaattcagtcttyccccttaatgcctgattcatatacctaacacctttctcaacaaatcccattcaaagtctaataggtatcacaaatttcacttgttccaacagactcctga

SEQ ID NO: 10599 - DNA, 201 bp, Homo sapiens
aaggatgacatgccattgcttaccaactgctactcagcaacacagaacacaatagaatcaaaacacaaagaactgttcaggtaatacaagcaggtctgtgmataaaagcttatatacatttatcagtgtatgtgtacatgcgtgcatgggggtggggatgtataaaccaaagcaagtcctagaggtctgagaacttgaatc

SEQ ID NO: 10600 - DNA, 201 bp, Homo sapiens
aaccttcagctgatattgtgcatgttataaatcaacaagaatgtcctcattcggccaaaatcagggacaaggatgacatgccattgcttaccaactgctaytcagcaacacagaacacaatagaatcaaaacacaaagaactgttcaggtaatacaagcaggtctgtgcataaaagcttatatacatttatcagtgtatgt

SEQ ID NO: 10601 - DNA, 201 bp, Homo sapiens
gatcataaagaggaatacattgcttttaggtttattttgctttatgtcataaactaaaaataaataggcacctctaatttcagtttgacatcttcttttgwcttagaaatgtagtctaaactagagatggctgactccactccactgcagtactgcccgtaaataaccaatctgaaagggaaaaaagacaagaaatctcta

SEQ ID NO: 10602 - DNA, 201 bp, Homo sapiens
attactattttatagagctgtttaaatattttataaaattgacatgaaattatatttaaaataatgggaaatgtactgcttcactgatcataaagaggaayacattgcttttaggtttattttgctttatgtcataaactaaaaataaataggcacctctaatttcagtttgacatcttcttttgacttagaaatgtagtc

SEQ ID NO: 10603 - DNA, 201 bp, Homo sapiens
taccatattactattttatagagctgtttaaatattttataaaattgacatgaaattatatttaaaataatgggaaatgtactgcttcactgatcataaasaggaatacattgcttttaggtttattttgctttatgtcataaactaaaaataaataggcacctctaatttcagtttgacatcttcttttgacttagaaat

SEQ ID NO: 10604 - DNA, 201 bp, Homo sapiens
caaactctcgggctcaagtgcatactccttggcctcaacttctcaggtagctagaactacaggcatgagccaccctgcccagctaactagtaaacattttwaatctacatatacattatctaacgtatctcactcgtcctgcacttcttactatctacgcaagttattcataatctctctgaacttcagctttctcataag

SEQ ID NO: 10605 - DNA, 201 bp, Homo sapiens
agttctttgaaagcatgaagtcctcgaactcctcttcaggaaaaaaaaaacaaaaaacaaaaaacaaaacaaaaaaaaaaacatgatgtacaaaaaaacasgacttaacctaggtttctagacttatatactgttgtgatcatgcactctgtttatatcggcctacgtgccacctctcaaactttcccaactgttctggtc

SEQ ID NO: 10606 - DNA, 201 bp, Homo sapiens
aaacagtgaagggcttctgatttgaaaatcacctgccccttctcccctgacctcagtgctacactgaacaaagaaaaggaaaagggatattaaacaggcawataagccacacgctgttaaatttaagagctggctatatatctctacctgaaatttaataaaattcaaaatacatggataatacagtgactgatacaacaa

SEQ ID NO: 10607 - DNA, 201 bp, Homo sapiens
tgtgtcatcaattactgcagttcattagaaggataactatttcaaccagtttcttacttctacagattgtagagagctctggatcatgggtctcaaacagraagttacattgttaatattactataattagtaggtcttatctcctctgctgcattttaaggcccttggaattaaggttgtagcttatatttcttatgtta

SEQ ID NO: 10608 - DNA, 201 bp, Homo sapiens
tttgcccacacttagtttttctggcacatggaatgatatattatgaggagctccaaaaaaacaccattaactctaatgatccgtgacttaatgagtatgtytgtctacagctatcagtcaaaatgaattggggacacatcctgacatgctagctgtgtcatcaattactgcagttcattagaaggataactatttcaacca

SEQ ID NO: 10609 - DNA, 201 bp, Homo sapiens
agtgagcaacctcataagtccaaaatcctgacacaattgcacatcccagcacaaggacctttccagttcatagacggagttgtgcttaagaaaatacactkttgctcacaagtttgtttcttctttgcccacacttagtttttctggcacatggaatgatatattatgaggagctccaaaaaaacaccattaactctaatg

SEQ ID NO: 10610 - DNA, 201 bp, Homo sapiens
ctcaactatggtttattcagttccctcaactatgatgtgctttgtccagcctccagcaaaatacatcttcctgtttaagaactacaatcctaggcctttcrtaacaattacaatcacaattgggtgtactctctctctgtcttgtgggtcttttaattattatcatatgtaatatctactccaatatgatttgtgctgtat

SEQ ID NO: 10611 - DNA, 201 bp, Homo sapiens
tctctactgaaaatacaaaaacaaaattagccggtcatggtggcaggtgcctgtagtcccagctactcagaaggctgaggcaggagaatggagtgaacccrggaggcggagcttgcagtgagctgagatggtgtcactgcactccagcctgggtgacagagtgagactccgtctcaaaaaaaaaaaaaaaagaaaaaagaa

SEQ ID NO: 10612 - DNA, 201 bp, Homo sapiens
aataaatgagtgcgtttgtttccttaacaatccttctctgtaaataacagaaagtatcttcaatttaaaaaaacaaatcttgtagtactttaactctaaayatgaataaaagagaactattttgtgtatgaaaattattttcttggccgggcgcggtggctcacgcctgtaatcccagcactttgggaggccgaggcgggc

SEQ ID NO: 10613 - DNA, 201 bp, Homo sapiens
cctagtcctcttttttcccctgattttacatactctacaaattctatcacaaccactgtcataatgtcaactatcacctcatgggccaattactgtgaaaygtatgtgctcaacccaaaattcacacgagtcccggactcatccgtccaactaaatggttctacctcattatttcaaagtcccctcaaatccaacattccc

SEQ ID NO: 10614 - DNA, 201 bp, Homo sapiens
atctgcttcttagaaagttattgttccttaagttttcaccctagtcctcttttttcccctgattttacatactctacaaattctatcacaaccactgtcayaatgtcaactatcacctcatgggccaattactgtgaaatgtatgtgctcaacccaaaattcacacgagtcccggactcatccgtccaactaaatggttct

SEQ ID NO: 10615 - DNA, 201 bp, Homo sapiens
ttggttttctctctataatgtgataaatctaatatgtctgggctccatttccatcaaaaatttcaaactgtaagaagaccaactagacaccaaaaaatcaygagacacaatatgagatattttcttttcaaagatgaatctgaattctatccaccaccattacactgacattgatccctattgttatgaaagattccataa

SEQ ID NO: 10616 - DNA, 201 bp, Homo sapiens
actcttacctttcagcttcttgaatacacctggttcttgcccaactctgagcatttcacctgctacggcttctgcctgggtcactttcccctagatcttcrtgtggctggctgcttcttatctgctaggtctcagttcaaatgacttaaaaggactttttccaaccaacttatctaaactaggactccccttgtaatcctc

SEQ ID NO: 10617 - DNA, 201 bp, Homo sapiens
cttaaattcactcatctctatttgcactgcccacagattaatccagggctgcatcctctcttgaaaccacttcaacagcttgctggctgggctgcctgctyacagggtcttcttgaaatgtcaatcagtctgttgtaatactccctgatagaaaccttttaatagcttcccactgcagtcacaataaaatcccaattcagc

SEQ ID NO: 10618 - DNA, 201 bp, Homo sapiens
ctgacatgcctgtcatacagtccaaggaacctgcctgctctaggacatgaaattcaatttccttctctgcagacattccttcactcatctgaagattatayagccaaacgaaacccataaaaaaaaaagcctagcatataagagcaaaggctcgagatcagctctgtctttgcatattaccactaacccaatcatcctatc

SEQ ID NO: 10619 - DNA, 201 bp, Homo sapiens
ggcatgtgccaccacacccggctaatttttgtatttctagtagagatggggtatcactatgttggccaggctgatctcgaactcctgacctcaggtgaatygcccacctcagcctcccaaagtgctgggattacaggcatgaaccatcacacctggccatcaagtctctcatatccacaaattaactgtttgttttatggc

SEQ ID NO: 10620 - DNA, 201 bp, Homo sapiens
agctggaagcagacattatcagggctttcctacatgatgaacttcaaagaagaaggaaataaaacaatggaatattctgatgcctgctcagattttatttwaccatatataatataacccttatttatagaagccctcaacttcaactctgagcaattctccaaaaagatacttctaccctcccaatatctgcatagacat

SEQ ID NO: 10621 - DNA, 201 bp, Homo sapiens
ctaaagacactgggaagaagccatcctgtggagatacacaaggcttgctgttcttcatgcattgtcatggatgctgcaggagttattttcttttattctcyatgacttatcaaaaaggagtactacagatttaataatggataagcagcaaaatttgaaccataggcaaaatcaaacttcaggatttacctatattattct

SEQ ID NO: 10622 - DNA, 201 bp, Homo sapiens
gctacccagcaaaccccgatctgagagtaaaaaaaggaagcctcctaggcaggtccttaccatttcataccgctaatgaactatgagcattcggtgttacyggtctctcaaaatcttgagcaggaaagaacttaaaagaaggagagagggagagaaagggcaccaacgtataaaacagaaggggaatggaggtcaatggaa

SEQ ID NO: 10623 - DNA, 201 bp, Homo sapiens
cttcttccccctaaagacattgccccttataagggctacccagcaaaccccgatctgagagtaaaaaaaggaagcctcctaggcaggtccttaccatttcrtaccgctaatgaactatgagcattcggtgttactggtctctcaaaatcttgagcaggaaagaacttaaaagaaggagagagggagagaaagggcaccaac

SEQ ID NO: 10624 - DNA, 201 bp, Homo sapiens
gagattttctgtgtatatcaacaccattatcaatgcatcctagagagacttaggaggagagctaagaagaacaggaaagtgaatcaagatgtggaagacgytgacacccaggtctatgtgagtgtttggatggtgggcctttaactaagacaaagcataggagagggaagtttgcggtaatgactaatgaggttgatttta

SEQ ID NO: 10625 - DNA, 201 bp, Homo sapiens
aattaggaaacttttgagttgttcaagcaagagacaatgagattttctgtgtatatcaacaccattatcaatgcatcctagagagacttaggaggagagcyaagaagaacaggaaagtgaatcaagatgtggaagacgctgacacccaggtctatgtgagtgtttggatggtgggcctttaactaagacaaagcataggag

SEQ ID NO: 10626 - DNA, 201 bp, Homo sapiens
taggccatattggaaagtttggacattattctgtaagaaatgtaaagtacagtatgtgaaagaatgaaaccatcagacggaagataattttataaattatrtaagaataagattaagagcagggaattaggaaacttttgagttgttcaagcaagagacaatgagattttctgtgtatatcaacaccattatcaatgcatc

SEQ ID NO: 10627 - DNA, 201 bp, Homo sapiens
agttaccacagaacagcctaaccttggcaaatgcataaagcctacatagaaataattagagaacaatttaattcaggctaccattggatggtcaaggtacrgttaatgattggcaaagagtttggacagaaagcaatgaaagggtggtccttggaactgttcggagaaaagggagcatgtttcaggcagaggaaatagtaa

SEQ ID NO: 10628 - DNA, 201 bp, Homo sapiens
atgttactttgtttaaactgagaggatgcaaagcaagctatactggtcaatgtcagagtaagaagtggagaccaaaggggcttagtcatgtagtgtagtgrggggaaaagcaaatgtccataaagattgctgtctgggattagaccttcgcggtggtgtactgtgagaaggaaacgacaccctaaaattacattagctttg

SEQ ID NO: 10629 - DNA, 201 bp, Homo sapiens
atataaacaacatcaaacaacaccattgacagtattttcaacaggaaagtatttaatgatgggcaacttgctgtttacttcctacatatcccatcatcttytgtatttttttaaataacttttttttggatttttaaagtaactttattctgagaggtaacatggattacatacttctaagccattaggagactctatgtt

SEQ ID NO: 10630 - DNA, 201 bp, Homo sapiens
ctcttgatatcctatatgttcaaattatgtacttatgcaaaaagtagagacaagcacctcttatattttgctgtactttttcttatttttactagatgttrgattaaaaacatactaatatcacttttaaagagaggttttaattgttagatattaatttacaaatcataattttcatcgttactttgaaattttcagatt

SEQ ID NO: 10631 - DNA, 201 bp, Homo sapiens
gatccctgctcatatcctggattccaggttagacatcatttcctgatgctcacatatctaaagtctatgcctcttttaagtataccctctgtatctccctratctcaaatcttcaccattacctttgctccaggacatagggagttgtgtgagggaaaacacatcttgttcattcttgtacacttaacaccaagtcagtat

SEQ ID NO: 10632 - DNA, 201 bp, Homo sapiens
atggaatggtattcaaccagcataaccatagatatggcaaaggaagtccactccatatctgacgttctaagtaaggaacagtttattgatgataaatgttygaagtagctcactaggttcattacttctttttcaggattttcttctaaatatttaatagatatatactttatcttctaaaacataactactacaataata

SEQ ID NO: 10633 - DNA, 201 bp, Homo sapiens
tggattctgcacccataaacaaattcttcacattaaaaactggtcatgcaagcattttaaggaggaagaatgtgaggtttttagagaaaataatttctcawcaaaaaacaatccaaaagggctgacaaatatacagacagtttatagacatattttggccattatgccagtaaggcctccagtttccaaacagacactgac

SEQ ID NO: 10634 - DNA, 201 bp, Homo sapiens
atgaggctgaaacctactcgactgcattccctgacaattaaggcattctaagtcacagtatgagataggaggttggcacaagatacaggtcataaagaccytgctgataaaacaggttgcagtaaagaagccggctaaatcctaccaaaaccaagtgacctctggtcgtcctcactactacattcccatcagcaccatgac

SEQ ID NO: 10635 - DNA, 201 bp, Homo sapiens
gtaactggagtgagatgatggttcattgtggttttaatttgcttttctgtgattattagtgatgctgaacattttttcgtataaatattagccatctgtaygtcttctgagaaatttttactcagatattctacctattttttgtaatttcaactcatattttagattcaggaggtatatgtgcagatttgttacatggga

SEQ ID NO: 10636 - DNA, 201 bp, Homo sapiens
ggacaccagggagatggtgatccatattggcagtaacataatttccatactgaggggtttaggcggcaatctggccagagaacattagggcaggtaaatcrgtttgcacattctctgtaccacatcaaaggataggaaggtctggtgagttcatgaaggagctgagatataaaatgatgaaaaaacaggttctgcattgga

SEQ ID NO: 10637 - DNA, 201 bp, Homo sapiens
ccatatgtgccagtgggactcttcacattaaatattgggaagaggaaacctaaaaacaaaaccagaaacaaaaaatacctgattatcatttttccatttcyggaaaataaagcatgtctttcaaaatcattaatcattatacccaaatacacttttttctccttttcaatctcttttcaagtttacttcctatgagactca

SEQ ID NO: 10638 - DNA, 201 bp, Homo sapiens
agtactaatgttattaagggtcctacatcatcgttcagaatagatttttgttagagacatcactgagatctcaatgtctttgcacattcttcatctcacawaactctctctctactcagttttatttctcaaaccttcttcctctgtagtaaccattcatgtctctgtcctcttcttggtctcatctctctcacccagctg

SEQ ID NO: 10639 - DNA, 201 bp, Homo sapiens
actggttgcttttccctcagaattcaattcacactcttcaccacaattccatgcagtagggatcctcatcagggccattttacagatcaaaacatgaaggytctgagaggctgagcaactttcctgcacacaggtggctgggggcagggtagggtgaaagtcagttttacttgatctcaaagtctcaggatgagctgaaga

SEQ ID NO: 10640 - DNA, 201 bp, Homo sapiens
tgaaactgagggaatgtgcagagacaagtagcaaagccaggcccagaagactcaatatatccaagaaccaactaagtccagagctctggataaagcacatratttcagattttaagcagtgtgtgtatgagtgtaatgagtgtatgtgatcttgaattgagtcaccgcagacaagggactaaagggaatgaaaagaaaagg

SEQ ID NO: 10641 - DNA, 201 bp, Homo sapiens
caactaagtccagagctctggataaagcacataatttcagattttaagcagtgtgtgtatgagtgtaatgagtgtatgtgatcttgaattgagtcaccgcrgacaagggactaaagggaatgaaaagaaaaggcattccaggcaaaggaaacaatattaatcaatattaatctggtgagtcatgatgatttataatttgga

SEQ ID NO: 10642 - DNA, 201 bp, Homo sapiens
ctgcactgtcaatgtgccaacagacagctcagtaggaaacatttccaaagagtgagttaatcataaactgacgattgaaacagttatggaaaattctttayatacagtacggaaacgaacaaagttacagatactgtcatgatgtcaaaaaataatatagtaatttctaatattatgccaggggaaacattttaattacat

SEQ ID NO: 10643 - DNA, 201 bp, Homo sapiens
cagaaagccagaaagagattcatcttttttcaaaagtaagaaagtaaatggtttttcaaaacataaaccctcaacgtcccccattccccccctctcccccsaccagacctcagcagtcttagaaaagaaatctccctctttcaggagcttttttcagtatttaacaaccctgaagagtgagagtcatatctaacctgaagg

SEQ ID NO: 10644 - DNA, 201 bp, Homo sapiens
agttccattacccacaagctaggacctataaatgggaaaaataatagtatccacatgttgggattgatgcgctgattccctcaatatatgcaaagtacacrttatgtgctatgtgaatgtttgcactatggtacagtagtggacaatcagctagacctgagttcaaactgctgcttcaatctcaaatagatatgtgatttg

SEQ ID NO: 10645 - DNA, 201 bp, Homo sapiens
tttttcatttccccaattcattttcatttttcatttccccaaaagagagggtgaaaataaagaaaaatcaaggaagatttttttaaaggtgcaggaggaayaggcggaaggataaaagaaaaataaaaccagaaatatctctggtgtttttcagggccaacagcttagagaagtgtccacctcacctgtgattcatggcca

SEQ ID NO: 10646 - DNA, 201 bp, Homo sapiens
ttttatcctccatcactttttggacctcaagacagttaaatcacagctttccagagattaaaggaatcttagaaaccaccttcttatccccccttcctttkgtacagctttccaagctggcaggcagcctgatgcccgagaaggctggtgccttctagatcacaaaatgaccatgggttaagaccggagagagaaccaggg

SEQ ID NO: 10647 - DNA, 201 bp, Homo sapiens
taaatcacagctttccagagattaaaggaatcttagaaaccaccttcttatccccccttccttttgtacagctttccaagctggcaggcagcctgatgccygagaaggctggtgccttctagatcacaaaatgaccatgggttaagaccggagagagaaccagggccttcccccaccccaggtagagtggcttccccatat

SEQ ID NO: 10648 - DNA, 201 bp, Homo sapiens
aaatcacagctttccagagattaaaggaatcttagaaaccaccttcttatccccccttccttttgtacagctttccaagctggcaggcagcctgatgcccragaaggctggtgccttctagatcacaaaatgaccatgggttaagaccggagagagaaccagggccttcccccaccccaggtagagtggcttccccatatg

SEQ ID NO: 10649 - DNA, 201 bp, Homo sapiens
atttcctcaattgcccacttttagtactaggatccagtcatgttttacccactgcatttggcagttttatcttttagtcagtatcttttaatctaaaaatmcttttgcctttattcttctttaatgacattgactttttgaagagtccaggctggttgtcttacaaaatgtcctaaattctgcatttgtttggttgtttct

SEQ ID NO: 10650 - DNA, 201 bp, Homo sapiens
atggcttccctttttatttgaaaaaataaacaccgacttctccaaagttgctaggaataatggactagtggtgttaactgaggcaatggaagaggaaaaayctctacagcttattgtgagatgagttatttcagtcccaaatgagaaatgacatttcatgagaaggtcggtgagtgctaatagaccttcacacaatgtaga

SEQ ID NO: 10651 - DNA, 201 bp, Homo sapiens
cctttttatttgaaaaaataaacaccgacttctccaaagttgctaggaataatggactagtggtgttaactgaggcaatggaagaggaaaaacctctacarcttattgtgagatgagttatttcagtcccaaatgagaaatgacatttcatgagaaggtcggtgagtgctaatagaccttcacacaatgtagattttctaa

SEQ ID NO: 10652 - DNA, 201 bp, Homo sapiens
attgaaagatcggccctgaatttgagggtctggcataattcaaattatgagtggccattataataagatgattggcagtttcgaaaggcacagaagagacraccatgaaaccgatttacaaacattaaggtacaagaagaattctccttctcttctcatcataactcctcctctatacctctccaaaggtctcagatcatc

SEQ ID NO: 10653 - DNA, 201 bp, Homo sapiens
tccaaaggtctcagatcatccttttttttaactggtaaggaggaagaggtgtaaggaatataataatatcaagcttctctcttactggagttccctatttytgtccctttcaccatatcttctctatatctctcttttaaaattaggtgagctaaatcttacatctcctagaaatttaataaaagaataatttttatttgt

SEQ ID NO: 10654 - DNA, 201 bp, Homo sapiens
caacacctgcattagtccctggacatacaaaaggaagacaagcagcatctttactcctccttttgtgtttttagtctttgcactaaaaaactgaatacctkggaagtgcagaggtcaaagttagcctggatcatctattttcctaagttaattaacctgctaatgaaagtggtgcatgtcgctgcctttggtgaaagaaag

SEQ ID NO: 10655 - DNA, 201 bp, Homo sapiens
attaacctgctaatgaaagtggtgcatgtcgctgcctttggtgaaagaaagtagcactcaactattttgttagccagaagacagctagctcaaagcaaccyagagatggggcccagtttaaaaaaaaaaaaaaagttaaaaagaataagacctagtatttgtacaacaggcagactatagtcaataataatttaactgtac

SEQ ID NO: 10656 - DNA, 201 bp, Homo sapiens
gggaagagaaaaatctaacaaggaaacataaatggatagactaactcgaattctgttaattcccacaaccagacacctttagtctgccttctttgagtcawatgttcacagtgaaattaatttcaatgaattaaatgttttatccttctttacccccaactctagtaaataccttaatttctgtgctctgcaaatctgcac

SEQ ID NO: 10657 - DNA, 201 bp, Homo sapiens
ggaaactctcctttataaaaccatcagatctcgtgagacttattcactcacatgagaacagcacaggaaagacctgccctcatgattcaattacctcccamcaggtcactcccacaacatgtgggaattcaagatgagatttgggtggggacacagccaaactatatcagtgttcttctgaccaaagttataagaaactta

SEQ ID NO: 10658 - DNA, 201 bp, Homo sapiens
caccatatctaacttttttcctgggtaggctattatgttcatgaatatccccacaagatcccaaaataggaaaactctttcatgaaataaatgtcagggcyacctctgtgcaagaacagtgcatcatgattcaccatcaacacatcggttctgtaaagaaagacccctggcatgtgaaggtaagtagcaccaaaccagtca

SEQ ID NO: 10659 - DNA, 201 bp, Homo sapiens
ctaaggctagaaatgttggtgatgatcagattgtccaaaaatttaaatatcaaactgaggtgtgcacaggcctgatcaagctgggtgcagaaagtcatcayggtttctgaagagaaggaaataatcaaaatctactggtagagtcctgcatgggccagagcagaggccactgctgcaagaacccacgcaagagatgagaac

SEQ ID NO: 10660 - DNA, 201 bp, Homo sapiens
cataaatatgtaaaaacaatttcttaacagttaaactatcttatgaaatcaccataaaccatgtggtatcttaataagaacagaaagaaaattaattaaaraaaagaatcaatgtcccagaaacagaactcagaaacataaaaaacattaccttaataaaggtaacttaaaaaaaatgaaagagaaaattaacactggttt

SEQ ID NO: 10661 - DNA, 201 bp, Homo sapiens
agaacatagtgtgtgaaaacttcaagatctataactcactgagaagggaatgtagcataatgctctgctgaactagactaacgtatagcatgtgataaaaygggaacagtactggcacaatgctaccatctaaagatttgcttaaaccaagcttcacttaatagttgaaaagctagataaaatgcataggagttcatcatt

SEQ ID NO: 10662 - DNA, 201 bp, Homo sapiens
cagtagctaaaaacagtgccttcatatctatttggaaagttgatgctatggtgaaatgtttatcctgtttctttacagacaccattgggggaaaaaaaackgtgaccatatgttccctgagaacccttggcatattaaatattaaacatagaacaacacaacgatattaagaatatttagggaaactctggcaaatgctgt

SEQ ID NO: 10663 - DNA, 201 bp, Homo sapiens
tattgaacacaagatgccagacacaaaagagtgcattatgtgtgattctatttacgtacacttaaaaaaaagaaatcagaaaaactaatcttagcgttgamggtcaagatagaagtacctttgaggcctgagggagggaccaaagtgagattctagggtgctggtaatatcctatgctaactacataggagagtcagtttg

SEQ ID NO: 10664 - DNA, 201 bp, Homo sapiens
taaaaataaatcaaagaaaaaatgttacatatataccatatatgtatatataaacagatatgtcacatataaatatataacatatatgatatatatgttayatatgttacatatataacatacgtatatataaacagagatgtatctcttgcatcttttaaaaactaatgtaaaaaattgttacaagaatcaacaaggggc

SEQ ID NO: 10665 - DNA, 201 bp, Homo sapiens
gtctgaagagcccttggcccttaagaaaacattggtggtagtcccgtagtactccctgtgggcctgtgatgctggccatggggtaaggctcctctgcctgyggaaaggggagggaagagtaggaagaactgtgtcttgtggtttgtatgccagctcagccacagtacaatagaacacaggtagacttctaagattttggac

SEQ ID NO: 10666 - DNA, 201 bp, Homo sapiens
ggctagggaatagggataaattcccaaagactgaaatatctgttccctgtagaaacaggtctgtagataagaaaggggcagaaatggaagaggaagcaggmatggagggaagagcttgcagcctagggacataattaggatgtcagaacaatccagaagtgcccagtggatgacttggttgtcctttctctccatgtttcc

SEQ ID NO: 10667 - DNA, 201 bp, Homo sapiens
agagtttcagccaatctcaggtggccagctgttcaaactgtgttcaaataaggcaaacgctgagctatatccaatccagctgattctgtacctcacttccmttttctgttactttcccttttctgaccataaatgttatcctcccatgtggcagccccagaatcgctgtggacctattctggttctgggggctgcccaatt

SEQ ID NO: 10668 - DNA, 201 bp, Homo sapiens
aaacctcccagtcagccaagtgatcatgagggtaaacaaccaatactctacaatgtaactgtgatgccagcattttttggatatagtgttttttggttttscatcccatcatgtctacaaaacacccagtcttgacttacaatgcttttaacttatgggtttctcaggacataaccccatctaagtcatggagcatcttta

SEQ ID NO: 10669 - DNA, 201 bp, Homo sapiens
acgaattactaaactgaccattgctcttggggaatacttaatatctccccccacccccatgcaccagaaagaagcccagaggaggaagagtaagacaggamaggtagagaatgtggccccaggtgaggtgctctccagatgtacccatgaagttcttggaagcttgtatggaactgtctactgcagctgtggttgcaataa

SEQ ID NO: 10670 - DNA, 201 bp, Homo sapiens
agcttgaccagtatcatgaggtagctacttttatcccattttacagatgagaaaatagattgagaggggttaagtaatccgtacaaagtcatttcacaaayaagtgactgagattggaataaaatctacatgccactcaagtctttgtttttaaccaagactttggaaatctgtgctttttgtccactagaactgtttctc

SEQ ID NO: 10671 - DNA, 201 bp, Homo sapiens
atattataattttttcatcctaggattaaaaaatatctagcattctcatctaaccaacattaaggccaatgtgaaggattcattaaataatcactcaatgrccattcatgggagcagtcaccctgtgccaggtactgagccaagaacaggaaactgacaaacaaatggtccctaatttcatggaactcacaacctaggagt

SEQ ID NO: 10672 - DNA, 201 bp, Homo sapiens
gtcaccctgtgccaggtactgagccaagaacaggaaactgacaaacaaatggtccctaatttcatggaactcacaacctaggagtaataacttatggtgaygcctaaacatacatgaatactcataccgttgggaatttgggacacatttttgttacctggcttaaaatagcaaaactgctctcctaggaactgagtaatg

SEQ ID NO: 10673 - DNA, 201 bp, Homo sapiens
aataagcagatgctgtgagctggttgcaagaggggacaaacagcctgggtgctgctgggaactgaaaaacgtgacttgagagcttctggttcatcgataaygctctccaagcacacccctgggttctggaaaccacaaaacaaaaaaaaaagtacttctactgtatagtgtccaacttctcagaatcaaagttctcacagc

SEQ ID NO: 10674 - DNA, 201 bp, Homo sapiens
gttgcaagaggggacaaacagcctgggtgctgctgggaactgaaaaacgtgacttgagagcttctggttcatcgataatgctctccaagcacacccctggrttctggaaaccacaaaacaaaaaaaaaagtacttctactgtatagtgtccaacttctcagaatcaaagttctcacagcacctggttctctctgagattct

SEQ ID NO: 10675 - DNA, 201 bp, Homo sapiens
gttcctgcttcccagagaaatgtaggcactcctgactccagaacagagcattaaaccatgtgcttgagaccagctgtcacaaggcacagtattaaaaggcyaaaaaggaacagctacactcactttctctcttcccctcattaactttccttagttttcctgatttcctttccttttcccattatatacctgtcaaaagtc

SEQ ID NO: 10676 - DNA, 201 bp, Homo sapiens
taattcagctagccctcacaagaaccctaggaggtaggttcttttatttggtctattttagagatgaggaagctaaagaacagacagatagacaggtttaktcactttctgagagtcactcggtaagtggtgaagtaatgttacctgctattattagtaatggcacttaagtatttttggtttttaatgacagtcagtgct

SEQ ID NO: 10677 - DNA, 201 bp, Homo sapiens
actccctgtgtccatttctagtgccatatataaaggaactagcctatggcatcctcaatcaagccaaagcctggaagggagacggataaggaaaaaaaacygcaaaacagcaagaaatgctgcattctaccagacactgtggcacaaagcagcatgtgctcagccacacctgggagaaaagtcagggaagacaatacaaag

SEQ ID NO: 10678 - DNA, 201 bp, Homo sapiens
aggtatttctcctaatgttatccctccccttgccctccaacccccgacaggccccggtgtgtgatgttcccctccctgtgcccatatgttctcattcttcrtatatagatatatcttttcacatacaaatacatatacacaagagtaccatatgagaaaatctgtccatctaaagagctctttcaataggtataaaataag

SEQ ID NO: 10679 - DNA, 201 bp, Homo sapiens
gatgtgtgagagtagctaactgcagctcccaccataatagaaaagtctgccaaacccctcaaaggaatttccagagttgagacaactctgaaggggtacckagaggtagcaatcaccatgcatgtttatgggggtataaaataatttacctcacttttaaatacgtatggctctccccacttccatgcctgttctttctta

SEQ ID NO: 10680 - DNA, 201 bp, Homo sapiens
gaacaataaatcagcctgaggatttcctttcctcacacgcatccttccctagcaatttcctcttgtgttcaatgcggattccatcaatagcacgacatttyctaggccataattttggcaaataaatcatactaaactctacatacctttagaagcaaaatccaacacatttgaatcaccatttaacacagtctttcataa

SEQ ID NO: 10681 - DNA, 201 bp, Homo sapiens
cacgcatccttccctagcaatttcctcttgtgttcaatgcggattccatcaatagcacgacatttcctaggccataattttggcaaataaatcatactaawctctacatacctttagaagcaaaatccaacacatttgaatcaccatttaacacagtctttcataaagagaaattaaaaagaaatttcattaaacgggtca

SEQ ID NO: 10682 - DNA, 201 bp, Homo sapiens
ttccatcaaaagccaagaagcactgatacaatgcatagaatgtgtggtgcctgataattagagctcaataaatattacccaatagtagccacttttcattmacaagtggcaacaacgaccaaatattctatttcacttctctgtatataatatatgacttcaaaacataatgcttccaaatatagtaaaccacagggttga

SEQ ID NO: 10683 - DNA, 201 bp, Homo sapiens
tcattcacaagtggcaacaacgaccaaatattctatttcacttctctgtatataatatatgacttcaaaacataatgcttccaaatatagtaaaccacagrgttgatagaaaggcaacaggaaaatatatggaaggcctagaagggaaggagtttagtggagacacgggattcttcacgtaaacaaggagctaagtgccaa

SEQ ID NO: 10684 - DNA, 201 bp, Homo sapiens
aaccttaaaggaaatgttccacctagtgaaggcaagttgggaaatagggaccaactcatcagtggcaactccttgctaatcctggtacctagtgttcttgmggtgtgcaagaagttctttcttgcatatctgacgtgtgacttcaggacccctcctatggtcctactgcccttgagtccttcatagcccctgtagtacatc

SEQ ID NO: 10685 - DNA, 201 bp, Homo sapiens
ctgacgtgtgacttcaggacccctcctatggtcctactgcccttgagtccttcatagcccctgtagtacatccacactctaccatttgctgaatgcccacyatgtgtcaagcactcttctgggcactttacatgcactgtctgcaagtgagaagatgctctcccacccattttaatgaagaagctagagatcaacagagtt

SEQ ID NO: 10686 - DNA, 201 bp, Homo sapiens
atcttgctctttattagggaactcaataaaaggatgagcttgtgtctccacatctgcgccccttctgttcagagctgtggctcagcattaaaataattgcygtatcaagcttaattactggtttaaacatcgttctccctgctagactgaaacaccttgaaggcaagggtggtaactcattcatcttcaaattcccagaac

SEQ ID NO: 10687 - DNA, 201 bp, Homo sapiens
ttaggatcacaggatttcttttctcttctgacatgttcaagtccttgattataataataaaggtaacaaaaacaatgacaataacccatactctaaatggygcttaccatctaacagaagaaatttacttgaggtaatttatgacacataaagcttccaattcaggaggccagggatggtggatcacctgaagtcaggagt

SEQ ID NO: 10688 - DNA, 201 bp, Homo sapiens
cccggtctgactgatgctaaaaccctccttcttcctatgaacaaatagtttaattcccatcctagaaaggttaatttcgaatctgcagagtttttctcctyaatccaataaatgagcctaatttatgctaaagaatttcaaatattaagatgccaactatccaaacttgtcagcaaacccatctgacaatcacaacaagga

SEQ ID NO: 10689 - DNA, 201 bp, Homo sapiens
gactgttttctttctttcttttttttgagacggagtttcgctctgttgcccagtttggagtgcagttacacgatctcggctcactgcaagctccgcctccmgggttcacgccattctcctgcctcagcctcccgagtagctgggactgttttctaagtgtccatccttgtgtctctctctctgggactattttatccataa

SEQ ID NO: 10690 - DNA, 201 bp, Homo sapiens
ggtacacgtcctggaatagaattaaaaagggcccagtaacagtgacatttaaatgggaacgttgaggtggttatcatctcccggactcttcattcactgcytaacattatagacaacctacctgcatcatgttgttctggaagcttcttgaaagagaactcttttatgcatattagcatccacttagataatattacacca

SEQ ID NO: 10691 - DNA, 201 bp, Homo sapiens
cttaagtcttctattactattatacatcacatctgatgtgtcataatatccttttggatcaccctcaaaatataaatatagtcacctatatggctacgtgytgttccaggccactatcatctcttaccttgattgctgtatgggcctaactggtcttcctgtgcctactctgtcatctattttcatggttttttttattat

SEQ ID NO: 10692 - DNA, 201 bp, Homo sapiens
cagcctctcaaagtgctggggattacaggcatgagccactctgcctggccgagaccagttttcaatttagaacatgaggttatatgagacactataaaagwattaatgaacagtataaaagatgagaaattctaagatcataagtactgctctgagccttgaaacatttaaaagatagcactgaatgaggttatctgaatc

SEQ ID NO: 10693 - DNA, 201 bp, Homo sapiens
aaataagcaagttatatttaaaaaatcataaaggcaaagatgtacattgctatgagtcataattagtaaatgtattcaagccttagaaatataggaaagtrctgtgttagaataagagttagaagtagcagcagtagtagaggaagtagaagttgtagagtcagcagtaacttttactgtttaccatgtaagagcactatg

SEQ ID NO: 10694 - DNA, 201 bp, Homo sapiens
atgtttgttagtttcattttgctttgctaaaattcttagtcccttccctttaacacgctgtgatacgtgcttccttacaaaagatgcccagatatggagamgaaaacacatatgcacgtgtctctaatagtggcattgctgagattttatacataacatataagaaaagcttactttagtcctgtgacaagtacttttagt

SEQ ID NO: 10695 - DNA, 201 bp, Homo sapiens
ttactggattggttgaggatacaaccaatatttgaagtgagaagggaggttggatttgactattcattatgcacaatttattaagttcagtttgagaatayagaaaaataagacaaaaatctagaaatttatactgttagtatttactagaaatatacacacatcaaaccaccaaaacacaatattatgaaagaaatctaa

SEQ ID NO: 10696 - DNA, 201 bp, Homo sapiens
ttttttgagacagagcttctctctcttgcccaggctggagtgcatggcaccatcccagctgcctgcaacctccgcctcctgggttcaagggaggcctgtgyctcagcctcccaagtagttgataccaccggtgtggttgatatttttcaaaaccagaattcaatctccctagactttgctggccttaaacatacagaaact

SEQ ID NO: 10697 - DNA, 201 bp, Homo sapiens
attgctgcccttggttttctctttctggaattcctgctacttgaatgctgtatcccctgggtcaacagtctagcttccatatagcttctctcatattatcyatctctgactttttggaagatttgctaaactttatttcccaagtcttctataatatttaacttataagagctcctttttattttgactgttttctaaaac

SEQ ID NO: 10698 - DNA, 201 bp, Homo sapiens
gatattatatttatatatgtattctgatatctcatttctatgcatgtattttaataccaataaattaaaaatagattcagtctttttaagagaagtcaaayacaaaattcaggaaaacaaatagaaatgagtaatgtgttcacattctgcattttgggggcagtatagcaatgtacagatggcataacttggaattctggc

SEQ ID NO: 10699 - DNA, 201 bp, Homo sapiens
gtttctttgtttcttcacccataaaaaataacaacagtcaccaccacttttcttatataaatgttgaagaaataaaacaaaacatgtacagtacaaagcayatatagtaaatactcagtatatattagttattatgacatcatgactatactaaatcctaaatatattttttaatagttggagatatctagaaaataataa

SEQ ID NO: 10700 - DNA, 201 bp, Homo sapiens
gttgaagaaataaaacaaaacatgtacagtacaaagcatatatagtaaatactcagtatatattagttattatgacatcatgactatactaaatcctaaayatattttttaatagttggagatatctagaaaataataattactatccattacacttcctaggttttgttaatgatactttcagcctccaagtggtaaggg

SEQ ID NO: 10701 - DNA, 201 bp, Homo sapiens
atgactatactaaatcctaaatatattttttaatagttggagatatctagaaaataataattactatccattacacttcctaggttttgttaatgatactktcagcctccaagtggtaagggtgccccatccttatattttgttgctctcatatgttgtaaattttatttttagaagctactagtgtcaaccagaagcagt

SEQ ID NO: 10702 - DNA, 201 bp, Homo sapiens
tgggtgacagagcaagaccccatctctaaaactataaaaaataaaaaaaaaaactactactgtcctttttgagctaatttttagtttttagacaatgaaakcatatttttctctctgctttattaaatctgtaaaatataagatacatatgcgtatgttccattcctttctgtggctggtataaactttaaattatcagtc

SEQ ID NO: 10703 - DNA, 201 bp, Homo sapiens
catatttttctctctgctttattaaatctgtaaaatataagatacatatgcgtatgttccattcctttctgtggctggtataaactttaaattatcagtcwagggcactgggcactcgcatgcacacacacccccctcgcagataaagatatggaaaggtcagcaatacatgaattcattatggtgttttgttacatctga

SEQ ID NO: 10704 - DNA, 201 bp, Homo sapiens
cattttggatttaaaaaaattagaatatttgaattacattccacatccctaatccaaaaatctaaaatcgtatgtgctccaatgagcatttcctttgagcrtcatgtcagtgcttaaaaagtttggactttagagcatttcagatgtcagattttcaaatgaggaatactcaaactgtatcaaaaatcatctttctagtca

SEQ ID NO: 10705 - DNA, 201 bp, Homo sapiens
catgtagtttttaaaaaacattttattgagaatatagtatccgtacaaaattatatatatatatatacacacacacacatacatacagaaatatttatatkggtctatatatatatataaataaatatatatgtgtctatttatgtgtgcttcttcctgaagtataccttatgaagctagatggcacacttagaagtgaag

SEQ ID NO: 10706 - DNA, 201 bp, Homo sapiens
tctacaattatctctattctctccttctattaaatgtatttgtatctcatcactccattttctgttttatttttaacttcttaatctctcttaactgctcyttgagcaatttcttcagatttctcctcaatttcctacacaactgtgtctgatatgccatgtaatatgtccattaaggcttttatttcaattactatacct

SEQ ID NO: 10707 - DNA, 201 bp, Homo sapiens
tctgctatatttgtggatttaattatatattttattgtttctgctgatcttggcataaggtggtttgtttctggattgatttaatgatttcaaattgtgartgtatgttgcctaggactttatgttaaaaatcctttgaggaatgtgtgcaaagaggctccaatccagacagcatttgaattttcattgggagaataatca

SEQ ID NO: 10708 - DNA, 201 bp, Homo sapiens
tttctccttctagccacttcttgggtcagcaaatatcattcaatatgattctacaggctgatttaattagtatctaccattgctaatgttctatatacagstagggacttgcatttgctttttcactcctttgttcattcattcaacagtaatttattaaatgcctactttgtgctagactatccctaaaacaaaacttca

SEQ ID NO: 10709 - DNA, 201 bp, Homo sapiens
accattgctaatgttctatatacagctagggacttgcatttgctttttcactcctttgttcattcattcaacagtaatttattaaatgcctactttgtgckagactatccctaaaacaaaacttcaagtgctcatttttatgccttattcaagaggatgtaaacagaaaacagtacatggtacattcaatgcttaatattc

SEQ ID NO: 10710 - DNA, 201 bp, Homo sapiens
gcatttgctttttcactcctttgttcattcattcaacagtaatttattaaatgcctactttgtgctagactatccctaaaacaaaacttcaagtgctcatytttatgccttattcaagaggatgtaaacagaaaacagtacatggtacattcaatgcttaatattcttgatttgatgtctttaggttcccaaacttcttaa

SEQ ID NO: 10711 - DNA, 201 bp, Homo sapiens
ctccctttcatcattatacttcatagtaactttgctaaaattctaaattgctatctccccaagaaactgtactttatcatctggcagccaataaattctartttttctgctgcttcttcccaaaagcctaaggctattaggaaaaatcagcagtgattttggtaaagaatccttgttaaactttatagatataaggagcag

SEQ ID NO: 10712 - DNA, 201 bp, Homo sapiens
ctttccctctacttacgtatatagatacgtatatcttggtatgtctgtaaacctctgtgtgcatatttacatgtatattaggaaggaaatagagttttttwaaaaaactacccgaaagattcactgtttgatctatagaggaatccttgaaacagcaaagagaagtttgatttcagttctcaaaccagatttccagttttg

SEQ ID NO: 10713 - DNA, 201 bp, Homo sapiens
cttcaactctattccctctgaactgggtccattttgaaactccatgtggtacccagatggttatagctccttgtgtagactcacatctacactcttctgtrtcaggaagagagaaaaataaaactacccttgcaaatgtcttattggtcccaactgagtgactaaccccattcctgaaccatcactatgtggtcaaaggca

SEQ ID NO: 10714 - DNA, 201 bp, Homo sapiens
aaaaaaaagtgtagaaagcgtttcaaactgttctaatttttgttgatgttggtggagtttgaagtgaattactactgaggaaagagctcaattctaagaayaaaggtagcactgaaaggcagaattatcataagcccttctagagaagcccaaatagatgctcttcaccatctcacaaaatacaaattatcatttgtgtta

SEQ ID NO: 10715 - DNA, 201 bp, Homo sapiens
tatatacacctactatgtacccccaaaattaaaaataaattatttattattattattattattattatcattattattattattattattttgagacaggktctttcttgctctgtcacccaggctggagtgcagtggtgcaatctcagttcactgcagcctcaatctgatctcatgtgctcaagtgatcctcccacctca

SEQ ID NO: 10716 - DNA, 201 bp, Homo sapiens
cagaacacaagaaagacattgagtctcaaacatgctatgtttgaagttacagaagaacagtcaaggagaattgcccagcagacagtcaaaaatgaaaaagyctaagatcaaagttggaatataggctgagtatccctgatctgaaatgcttaggccagaaatgtttcaaattttgaattttttttttcaattttggaatac

SEQ ID NO: 10717 - DNA, 201 bp, Homo sapiens
gactgtggagctcaggaggtccctacaaatctgaacacaacacagacaagtctttaactctctcagagtatttaatgtttcaaaaatgtaaacctggattrttgcaaaccaagccgaggtcaatgaaggtaggggaatggggaggggctgtgggtaaatgatgaaagaggccaaagaaaccaagaatattttgacacattc

SEQ ID NO: 10718 - DNA, 201 bp, Homo sapiens
agcaattagaaggagaaaaaaagttaaagctcatctacccatttcctgcaattggatttgcaaattctgtaaatttaattgacatatgaaaattgaatctycccagcactttgggaggccaaggcagtaggattacttgagcccaggagttaagagaccagcctggggaatgcactgagaccccatctctacaaaaaaatt

SEQ ID NO: 10719 - DNA, 201 bp, Homo sapiens
ataactagattagaaccaaaaaggtaaatcagattctgggtctgatttttagattataaacaagaaatctaaaatcaaacactaacagatttgtcttaccragtttttaaagatatgacaatctagagaaacaacagtgacagtagacaaaaattactgctgcccttttattagccttagtcggcaacttctgtttttaat

SEQ ID NO: 10720 - DNA, 201 bp, Homo sapiens
tagtctgtcttagcctgagtttcccagaaagtagaagtttagacaaaatcctgaatgcaggatttagttggtgaagtgatcctgaggagcagattaaaaayggggaaggaaggaagaaaaatacaaagacgaattactaaactgaccattgctcttggggaatacttaatatctccccccacccccatgcaccagaaagaa

SEQ ID NO: 10721 - DNA, 201 bp, Homo sapiens
cttcacttcccaagttacataatcccagtcaggaggtgactctcatcaggccacatccagccagccctagactgtctcctcctagaatacccctcatcttytcctgcctccccttagagtctgaactccaaaaaactttgagaatgttccttcagcgtgcaagtgatacctgcctgcccaatcacagtaatgttaacacct

SEQ ID NO: 10722 - DNA, 201 bp, Homo sapiens
ccagtatgcctgccacttaatgacctcaggagctttgcacttggtattccctccaccaggaatattcttttttccaaacagtgacattcctgtgttccttyactcgcttcaggtcccacctaattgtcactcccttggagaggactttcttgactaccttctataaaattgtattacatttctctctagttcctaactcag

SEQ ID NO: 10723 - DNA, 201 bp, Homo sapiens
ttaagtacatgtgctaggcactataagcatgttaaatacgtcaagttgtttcataaaatcatttcataagtctcattaaaggatttaatgacaacctgcawgatacaaactcatcggcctagcatccacttgttcagcagccttgcctctctgcaatgaggccaagaaccatgaggaaagcaaaaacagacatcaccaggc

SEQ ID NO: 10724 - DNA, 201 bp, Homo sapiens
gatgcggccgccgccgccgccgccgcggttcctccgcgccccgccgacgccaacagccgccggccctttccccgcgcgggatcgagggagcaggagccgcrgctgacgggtcgcgggcgccgcgctaggctcggctccggtcccggcccgggtgcgccgcgacccggccgccgctgcagcgagtcccgcgcgctctccgtg

SEQ ID NO: 10725 - DNA, 201 bp, Homo sapiens
cagcttggactgaaagtcatgttttcaaacttgatgcccatactgcttcctaccagtaagagtaagaatttccatcactgctggctctttgccagctattycgtgccaagcaagcactgagcttgaagtgctttgcctgtgttatgaccacacagagaggaggtaacaaagccaagaatctggatccagatctctctgatc

SEQ ID NO: 10726 - DNA, 201 bp, Homo sapiens
gatttgcacagcagcttggactgaaagtcatgttttcaaacttgatgcccatactgcttcctaccagtaagagtaagaatttccatcactgctggctcttkgccagctatttcgtgccaagcaagcactgagcttgaagtgctttgcctgtgttatgaccacacagagaggaggtaacaaagccaagaatctggatccaga

SEQ ID NO: 10727 - DNA, 201 bp, Homo sapiens
tgtatgtgggtagggtgagtattttcatctccattttacagattagaaaactgaggcttattaaattgtccaaagatttgcacagcagcttggactgaaartcatgttttcaaacttgatgcccatactgcttcctaccagtaagagtaagaatttccatcactgctggctctttgccagctatttcgtgccaagcaagca

SEQ ID NO: 10728 - DNA, 201 bp, Homo sapiens
tctcctttcatttgatattgacaattaagagtgcttatccttcttcaatctgaccaagattatttctctttagcctacttcatctcacttcctccctccaytgagcatctggcatgatccataattgtagccagcctggctaaaaaataaatcttctgataaagtgcactgatttaatgaatgcattcctacaagactgct

SEQ ID NO: 10729 - DNA, 201 bp, Homo sapiens
aattgccttgggccaggagttcaagaccagcctgcacaacataacaagactctgtctcaaaaaaaaaaaaaaattcaaaaatgatatgacacaaatatgamaaagtgttaatatctcttaaatcttggtgatgagaacaggaatgcctcaaattgcactttttcaaaaaagtgaaaatatatcactttttaaacctttaaa

SEQ ID NO: 10730 - DNA, 201 bp, Homo sapiens
agcagtctccacgggcccaatactaatcaatcagtatccacatggagctctactgtgttccctcagatatattctctatacgtttagtggaaatgcacccmgtgcagttttttttttttaaaccataaaatgctgatcatgctttcagtaatgattacctaggaatcacacagacgcaaattccggaaaagagggaaggag

SEQ ID NO: 10731 - DNA, 201 bp, Homo sapiens
ctgctgtgtggcctggttcctaacaggccatggacctggtacttgtctgtggcccaggggttgaggacctctggcctaacagaaaggcaatgtgatgtatwaacaaaagatcatgagctttaaaagttgatgaatctatacttgaataatgacttgaaaattgagtacttggatgactttggacaagttacttcacttctc

SEQ ID NO: 10732 - DNA, 201 bp, Homo sapiens
gaactatgtaattaaaaataaatcaaagaaaaaatgttacatatataccatatatgtatatataaacagatatgtcacatataaatatataacatatatgwtatatatgttacatatataacatacgtatatataaacagagatgtatctcttgcatcttttaaaaactaatgtaaaaaattgttacaagaatcaacaagg

SEQ ID NO: 10733 - DNA, 201 bp, Homo sapiens
caggttagttacatatgtatacatgtgccacgctggtgcgctgcacccactaactcgtcatctagcattaggtatatctcccaatgctatccctccccccyccccccaccccacaacagtccccagggtgtgatgttccccttcctgtgtccatgtgttctcattgttcgattcccacctatgagtgagaatatgtggtgt

SEQ ID NO: 10734 - DNA, 201 bp, Homo sapiens
ggaaaaaataaaccactccatgaaaatgaaccataaagtaaaaagtagttttaaggcatatatatatatatttttaaggcatatatatatatatatatatwtttttttttttttgagagatggagttttgctcttgttgcccaggctggagtgcaatggtgcgatctcagctcaccgcaacctctgcctcccgagttcaag

SEQ ID NO: 10735 - DNA, 201 bp, Homo sapiens
tgttgatgaaattccttagcttttgtttgtatgagaaagtctttatttctccttcatgtttgaaggatattttcactgaatatactgttctagggcataawtttttttttttttttttttgagacagagtgtcactctgtcacccaggctggagtgcagtggtgtgatctcggctcactgcaagctctgcctcctgggttc

SEQ ID NO: 10736 - DNA, 201 bp, Homo sapiens
aagaatatatgaatccttttgatttggccagagggacattttgactttcctgtttcaaaacaaccattctgatgaggccaggtcaaaagtgctgagcttaytagaaagtaatggaccgaaagatatcccccatccaattcctgattcccatactgatctcacctcattgctaacgcccatcccattaaatcctaattctca

SEQ ID NO: 10737 - DNA, 201 bp, Homo sapiens
aaaaatcatgtcccaggtcatctttgtgtgtgtgcgggggaggtggatgggaggaaaaggcatgtattaatagatactgctgctataaaatgacataaatyatagcccttgatctgtttctgtaaacaatgccagcttcttcaggttattggcaactacccttaatatacctagcccagatcctttcataaagtcaagtgc

SEQ ID NO: 10738 - DNA, 201 bp, Homo sapiens
ttgcagggctcttctgggaagaacagctcttggttttgccctggtccctgacaatgacagactggcaggctgtttcttgcacagctctaggcaagccattwatctgtcagtaccagcatctttagaaatctcagcattaagacttaggaggggctaaggagggaggatgttgaacagccagaaatgcagctttttaaacac

SEQ ID NO: 10739 - DNA, 201 bp, Homo sapiens
tgttggtccatctgactctgcttaactccagaaaagaagtccttgctcatgcattagcgcatccattggttatattttaaaatttggaaggaagatgtttwatgttattgtgcccctaatttttaagtgacagcaaattgtattctcaattacaatacttacagctgttgcctgctctattacccctctgtccagctgaat

SEQ ID NO: 10740 - DNA, 201 bp, Homo sapiens
gtagaactaaatagtgtcaccatggatcttttccaatttgcctttatgctttctgtattttagtctaatccacccctgccttaacagtcattgaccttcasgtacaacaagtaaataagaagactctaaacaaaagaaatcgctaagctttccttatctcacactgacacagcagtgtcaacaattcaagtctctcaaaaa

SEQ ID NO: 10741 - DNA, 201 bp, Homo sapiens
atagaagagtaaactaataccaataacaagaggatactgaactattcttaagaaacaactcaaatccacagatcactccttacttataatagacaagtgtkttatttgactccaacatgataaaaggtaactccatgaagtctgtatgatcttgattttgagaaaccttcacaccaattaatcatcttctacctccttcca

SEQ ID NO: 10742 - DNA, 201 bp, Homo sapiens
ggctctgcagcagttttttaagtcccatagtaactataacactgtggagcagcctcattaccatccaaggaagttctgcaggtgaaagctcaagctggtaygtcttgcagagatgtggagagcccctgtgcgtgcttttatcatgtctcagctgtgtctgtcattcattatttgtgcatccacttgccacctccctccaag

SEQ ID NO: 10743 - DNA, 201 bp, Homo sapiens
tataagatacacagacacatttattttagcttttctatatatactatgaaatgaaatctcctttaagtatctttttaaagaaaattctagcaataagttaytttaaatagttttttgttatgagattaattcattcgtccacaattttgataaattttcttaagcaattagtaataatgagtaaaatttacttttaaaagg

SEQ ID NO: 10744 - DNA, 201 bp, Homo sapiens
actgcactcttgtctggaaacactcataccctatcaacacaatattccttctcattgttaaggtttagaggggtcttctctgaccataccatctaaagaaygttgtcctgcatcttgtactacctactccattattctcattacagtattcctatttttgtggcacttatcacaattagtattgagtgtatgcatttttat

SEQ ID NO: 10745 - DNA, 201 bp, Homo sapiens
gaaggagtgggatacttaagaagaatggtggagctttggaaaaatcactggctaccacaattgaaatggtggttagagacaaacgttcaatctttgggcaytcttatataacaagatgacagacaataaaatagatgtaagcaaataaaatagctgtcccttctgcatgtgcacaattgattattatccaacagtcttttc

SEQ ID NO: 10746 - DNA, 201 bp, Homo sapiens
acctctgagaactccaggtattactgtgggtaggtaaaaagcaaatatggtcagaaatggccacaggcaagctaattaggtagttcccctgaagtgaactsttaatatattaaagccatgcaaattagatcatacccagaggtcctcggtttggaaaaaatgctctggtaaagtaggaatttttaataaaaatgataatta

SEQ ID NO: 10747 - DNA, 201 bp, Homo sapiens
gtaaggtgttagggatggagcaatgctgcctcatatgtctttctgtagatggactggaatgcccaccacatgcccataacatgtaaaattatatttaacaytacaaagggtacatactagtgtatacactagtatgtatacactagtatactctgtatactcgagtatacagagtatacactagtatactctggtcaagta

SEQ ID NO: 10748 - DNA, 201 bp, Homo sapiens
tcccacttattcctaagttttttatttactctatcttttctggtattgctttcttcttggttatgagcttcatttaagaagttcacctagtagcacactastataggtatgttgctgacctcttccccaaagcaaaaatgtgtaacccttgccaagaattatgcttaagcccaggaaatagccactaggacattgtcatta

SEQ ID NO: 10749 - DNA, 201 bp, Homo sapiens
ggatgctgaggtgcaaagtagcgtaaactacaaaacttgaactctaagtttcctcactggcagtgattaattggaaacagacagtcatattccttaaaaartgacaagaaatacacatttcattatattataaactcacaactaatctcagaaagttgcttctctcttcttgggaaaatacagacccaacaattgtttagt

SEQ ID NO: 10750 - DNA, 201 bp, Homo sapiens
tttatccttagtctaattatctccccaaatttttagtttcccatcttttttctacataaagagtttctttaatcaactttaaataccaaaattatattatrgttttcacttattcaaatgtagcataacaagctactcaaacaagtcagcctttcccttatccccacaaagcttagagtctaacagggaaaaggaaaatgt

SEQ ID NO: 10751 - DNA, 201 bp, Homo sapiens
acgcccggcctctgtatcttgaataattaaagtaagacttcagcttatgaaacaaaacaatttaacagcagttaggtcaatgtagtataaaggggactttrtaagaaaattccacatgtattaaatcatggcctacaaataagaatcagtttttattttttaagaatttcaaatgttatggcctatgttctcttaattttc

SEQ ID NO: 10752 - DNA, 201 bp, Homo sapiens
caaatacaccagaaaaaaaatataaaaatattttcgataaatgtaagattgatctctctcacacacacacatatattcttacaagtaatttagaaaagcaycaaatcttgaatagaaagagggagtaagcataatagataattctcagaaaaaaatacacatagccaaaaacattaaaataatctatctcactaaaaatca

SEQ ID NO: 10753 - DNA, 201 bp, Homo sapiens
aagctcagaatatttaagtaaattccccaagctcacatagctaacaaatggcgcaaagctagcatttcaaccatctctgcttgactctaaactattctccyacactatttcctttagaaccatgccaactatgggatcattttacattcttcacagatatcatctcatcaagacagggccttggaatttatataaacatta

SEQ ID NO: 10754 - DNA, 201 bp, Homo sapiens
tttctctgctctgtgcttctggtgacctcactttttcggaaaatgttccactgcacgctgagaattatggacatttccatggaggcatttttgtgttactsattaaaaattgcagagcttttctacagaaaaggagacacaggaacatataaggatctagaaacaaaactttcttcacattgttcagaaaacatttgattc

SEQ ID NO: 10755 - DNA, 201 bp, Homo sapiens
tggggagccatgtggcaagcagtcacagaattgcctttctcagtggagaccaaaatgcaagaactctgatttctctgtcagagaagataaggtatgagagsataattggctatcctattcttggagtacccagggcagagctgatacaaataaaacttgtattagagtaggagagaagagatcagtgtttacaggtataag

SEQ ID NO: 10756 - DNA, 201 bp, Homo sapiens
ttggctgctactgtatggctgtcttagtattccagaactgttcagagcagagcaggagcagacagatgagaataacatggccaataacctttatcaaggtytaggacttctgagacattttcagcacttgagatggaaggaatggatgaaaagcactgagaaaatgaggtattcccatgtttagaaccaaaacagggtagg

SEQ ID NO: 10757 - DNA, 201 bp, Homo sapiens
aaggaatggatgaaaagcactgagaaaatgaggtattcccatgtttagaaccaaaacagggtaggcataagggccacaaggctggatacagaagaaaatgrgtgcttgtagaggcagcagagaaacacatcagacacttcggaaggaaagaaacatgatgagagctgtgctttcaacccaacagcagatgggtagaaacag

SEQ ID NO: 10758 - DNA, 201 bp, Homo sapiens
ccttgcctgtcctcccagccacaagcattcagcgcccatctgatgtcacagcctcccctgacttgtgcttatgctgtgttgctgcccttctgtgttttctstccacacaaattcaccttcagggttgtcttcccacacaaatagggaacatcccataaaaatgctgcagccaccagctcagccctcaagtaagtcctccac

SEQ ID NO: 10759 - DNA, 201 bp, Homo sapiens
aacaaaaacaataacctaatcaaaatggagctgacataaaggttacaagacttaatacacataaagtgtcctgtactatatctgacattggataaatagaraacacatcgtaaatgctacaatacacattttgaggtagctattatgtctccatttttttcatttctaaattgaagctcagaaaagtcaagcaacttgtcc

SEQ ID NO: 10760 - DNA, 201 bp, Homo sapiens
tgtcctgtactatatctgacattggataaatagagaacacatcgtaaatgctacaatacacattttgaggtagctattatgtctccatttttttcatttcyaaattgaagctcagaaaagtcaagcaacttgtccaaggctcgtgaagcgactaacagagtgaactctgatttgactcttaacccaatattaaggagtata

SEQ ID NO: 10761 - DNA, 201 bp, Homo sapiens
ccttccctctaccactccaaatgtgatctatccctgcaacataggtccccactttttctttgagagcatcctagattactgtagtgtataatgatctgtcytttctctgaagttatatggcacttacaatctgaaagttgtcttatactattattcagctgcttcagacattcttttattcaataagtgtttattaaatgc

SEQ ID NO: 10762 - DNA, 201 bp, Homo sapiens
tctggccttacagttctttcaatctaggatgaagatagagacatgaaaagaagtaaacctaataaagtgattcccaaaggtgtaagatatggtggagaatraaagagagattggacaatcctacagtataggatggggggtggcacaggaaaagggcatagctgctttcaatctgagtcttaaaagataaatagatgttcc

SEQ ID NO: 10763 - DNA, 201 bp, Homo sapiens
gtgagagacagggagacagttatagagatgaccatagcaatctaggtagaagaccctgaagacctaaagcaagacagtgacatcaggagtgaataaaggartcagaaatgataaaaccatggagaggggcatgtcggtttagagaggtcactcttacaacagtcagttgggagtcaggtggctacaatggcagcagggaga

SEQ ID NO: 10764 - DNA, 201 bp, Homo sapiens
cctatctcagaattaaataataatgtgtgacagcctaccttcaggatatttgaaaaaaatcaatgatcttttaaaaatctgagctctgatatttgcaaagyacttttggttcagacaaggaaaagcactgaggaatacacatacagataaatcaatcaacctataaaaagaaagaaagaaattgctcacagaagataaaca

SEQ ID NO: 10765 - DNA, 201 bp, Homo sapiens
tgatagggtttgggttctttcgtaattttgttctccttgaccagcattttttaagctccactaaaatgtcttttccatccagtttcctattctgtttttamgatgatgaatatgatctccacaattaaatcttggaatcttgaagccttcattacttttcatcattaacattattctcagctgctttaactttcctctaaa

SEQ ID NO: 10766 - DNA, 201 bp, Homo sapiens
cagctgctttaactttcctctaaattattaaaaatattacttaggcataaattaattattaggcatttaacctccaaacacctttatgaaatcaggtttaytggcaattttaaataaatgtgaattctcatttgccaaatgaatttaaaaaccaattacaaacagtctactaatgaacatttaaaattaatatttgactat

SEQ ID NO: 10767 - DNA, 201 bp, Homo sapiens
tataaacttgcatgagtctaatgccacaagcaaaaagactgcttagctaatataatctgatacaaaagtgtttgcaagacaagaaacaataatgcaagccragggcgcaactatagaattataattgtcaccaagtatcattttaatcttgatactctcctgtcttgaaggattcagaatagttttaaattcattattcct

SEQ ID NO: 10768 - DNA, 201 bp, Homo sapiens
aaatcttgaaataaattaacttgtaaattaagatttggtttactttgctctaaggaaattctttgaagcaaaaattatccttacagatggttgttaataawatacacaatgttacttattatttgattttataaaaatatcaaattcttacccaacagcaatcactgaaaaataagtgcaagtatttaaactctaaatcat

SEQ ID NO: 10769 - DNA, 201 bp, Homo sapiens
ataaaaatatcaaattcttacccaacagcaatcactgaaaaataagtgcaagtatttaaactctaaatcatatttttcatctagtgaatgaatatgctacrcaggaatacctcttgcttataaaacaaactgaaaaggaaactttcatctttagaaaacaacagtaggtgttcttgctacaaatgaggcagcatggtatga

SEQ ID NO: 10770 - DNA, 201 bp, Homo sapiens
cccagactctaaatactcttaacattaaagtattaaaatctgaagccatcctttaaatactcaaaagcagaatattaaaatgctatgcacaattcaatcasaagtctccaaactgacttctaaacatctcaaaaagataaactgttctatttacttttctttgtgaggacaacagcatctagcattcattgtaccctgcct

SEQ ID NO: 10771 - DNA, 201 bp, Homo sapiens
tttttctaaattatatattggtgtcaaatggcacctttttcctaattatttgaagcgaaagcatatacacttaacttacaacaacttacttctaagtgaaragaaaaaatatttggttgcaaatgcctttcttagatgcccaggagcccaataactctgaaaatttgtccatcagcatcacatgcacaggacttttctaca

SEQ ID NO: 10772 - DNA, 201 bp, Homo sapiens
cccctttcccacatctctaaccatgaggttcaacttaacttcccttccaataaacaaaacagaatccttattctttaggagaaaagagaagtaaaactgaracgacctcagattctaacaggcagagggattgttggatgaagagaaggcagtaaacaggatgcttggataatttttgtctggcaatataaatacaattgt

SEQ ID NO: 10773 - DNA, 201 bp, Homo sapiens
tattttaaatgctggaagtggttatggccaaagaaggtcagagaacatgactgcgagagacagaggctgagatttaggtcacctctggggagaatatttaygttcaccagatacttactgttcattagtgttcatgcttttccatggccttatttaatgttctaaattaagagccctaatttagaggcttaacatagtatt

SEQ ID NO: 10774 - DNA, 201 bp, Homo sapiens
accaaagttatcaagcagccagcagcctagtagcactcctgctcacagcaaaaacattcccgtcgctgtacacattatacatgctacaagcattagagtasacttattggttgttcattattcataagtgatttaactagtaaaaataaaagcacttttaaaaatagaaatactcacaaagccatttcaaactgttctagc

SEQ ID NO: 10775 - DNA, 201 bp, Homo sapiens
atatttgactttaaaactttgctcaagtataaacctactactaaactccaagatttagaagccttggattgtatttaatttcaccctcttctttcctaaasgtttattttaaaatagtattgactggtttgttcttttgataataattatgactttgagtaaattactttgaagtgtcaaagaatgaacttaaagccaaga

SEQ ID NO: 10776 - DNA, 201 bp, Homo sapiens
ttggtttattgcttctcttaactctccactggaaaaaagacactactaataaaatgtgaatatttatcgaagacttgatgcaaagtaattcattagccacktcttagtactaggaaatacgttgcttgatttgaaaagagagataattatattttaagcaaaatttcttgatactccaattcctataggttgtcaggagat

SEQ ID NO: 10777 - DNA, 201 bp, Homo sapiens
taaagcacttagcacttttccaagtgcgcaagaagagtcctacccatctaaattattatcactgttcaccccatcagctgagtgaggactgcccttgcggragacagtgaagaatgcactagcactcaatgcagttaacaattacaggaggcacagatgatattcggtcacctaaaaatgttctgaaaatgctgccacaga

SEQ ID NO: 10778 - DNA, 201 bp, Homo sapiens
aaaacccacaatggacacataaattggcagtggctaaattttgcttgaaattttcaacatactctattaaatcaggaaggcctttgtagatgtcttcatcrttaatgctttcttctgttgggaagggcctaggaagaggagaaaaaacaaaaacaaaaaaacaaacccatgagtgaacgagcaacaatcaggctgcgcact

SEQ ID NO: 10779 - DNA, 201 bp, Homo sapiens
ctgtgatggccagagacagaaatatggagcactgaataaagaaggtaaaaaacaaatttgatccatttccatgaaaccaggctgagtagagactgttttgytttatttcctaatgttacttatataatacatctttgctgactgatctaacttaagtatgtagtatctgaaacagaaaaggctcaacacaacatacacatc

SEQ ID NO: 10780 - DNA, 201 bp, Homo sapiens
gactgatctaacttaagtatgtagtatctgaaacagaaaaggctcaacacaacatacacatctatatttttatgcttatcaactgcataatactctattgyaaggagatgacatactatatttaaccaatttacttccaggtttttaatttactactgaaccttcaatacacattcttgtacacatgttttatacttgttt

SEQ ID NO: 10781 - DNA, 201 bp, Homo sapiens
attatcgtgaggattaaataagctagcacgtaaactatttaaatagtagctattctgtataatcaccaactttaaggaaattgccttaatttaattctgastgttttcagaaaaagttttctaaattaaccttaattatgtttcaaagattccttataaagatcttcagtacttaaatctaaatgttaaatatactctgct

SEQ ID NO: 10782 - DNA, 201 bp, Homo sapiens
ttgtacactgagtccatccgttaactctaagtttagccaaagcaaataaagactgtttagtcaatgcggtgtttttagaacaatgtgtattctataaaggygaagcgtatccggatttggaatagacaagtatacaaactaatgccagattcttaaatcctctttgtggggattctgacctgccactggaaacatccattc

SEQ ID NO: 10783 - DNA, 201 bp, Homo sapiens
taggttaaatggatccaaattatagtttgtgctgtccttggtaacaatcataaatttaagaagtattctatacttactattttttgaatcttcaaaagtgraactacagagaacaagaacttcctttaaaaaaaaagccatatactgggctgattagaagtgcaggctcagaagtcagattttctgggttcaaagaccagc

SEQ ID NO: 10784 - DNA, 201 bp, Homo sapiens
ccagaacgataggatctcgtcgtggggaacatgccatggatttccagcccaaagatgctccatcttttgtcccagcctcaggactgctcaaagaaaatcaygaagcatctgtaaacgtttcaaaccatctaacagaagttatgactgcctaccagactaggagaataaaatgacagtccttaaagtctgtgttctcgctgg

SEQ ID NO: 10785 - DNA, 201 bp, Homo sapiens
taaactgagaaagttgttttaacaatagcctaagctctgaattgattagggagtaaatctgggagatagtaaaggaagcagataggacaagcattatgaamacagggatccacttgacttgcgtactgctggacacgccaaatcccagagacgcagatctagcttgagcaaactttagaaaatctgatctgactctagtta

SEQ ID NO: 10786 - DNA, 201 bp, Homo sapiens
agaggtatttgggggccaccatccccttctttagaaactgcttctgagatactcttgccagccactctgaaggcagacaacaatgcttgttctcatctgcyaagctgattttcctcctgccagtctccaggaatggaacagaaatcctgaatgaagaaatatttttaaatggacgaagttaccaagataactagcatctaa

SEQ ID NO: 10787 - DNA, 201 bp, Homo sapiens
tctgtttggggcctaaataaggatcaaatatttgtaagagtacttattatgctcacaggtataaattcttttaactcacaaaataaattcctgggaatcaygacagagtcaataagttatgtggtagtctcacaagtggagttcaagaaatagacatgctgttatttgtaaaaaaaaaaaaaaatatatatatatatgcaa

SEQ ID NO: 10788 - DNA, 201 bp, Homo sapiens
ctccaataatggcttttactatcttcaacccttgagggtaagaacatacgttggaatatttggtacaatttttcttgctgtgaaaataccaatatttttaktgtaaatcctctataataaagcacagtgaacaatcctaaccaccagttttcttcaaatgaggtgttgctcagtccaacattgtagaccaaacctaacata

SEQ ID NO: 10789 - DNA, 201 bp, Homo sapiens
tacgttggaatatttggtacaatttttcttgctgtgaaaataccaatatttttattgtaaatcctctataataaagcacagtgaacaatcctaaccaccasttttcttcaaatgaggtgttgctcagtccaacattgtagaccaaacctaacataaccacaaatgttataatgtacagtgcattttattttctaggctcat

SEQ ID NO: 10790 - DNA, 201 bp, Homo sapiens
acagaaattcttggtttctaggtgtcaaaatgatcatttcaaatcagggtacttctctaagaaaggtcattccactgcaaattctaaccctttcctcgtgwtcctttgtcaaatatttcatttaaaatagatatttgaaagagtagagctggaagccacagcaactttcttttctttgcagttaggctcagtatttagaac

SEQ ID NO: 10791 - DNA, 201 bp, Homo sapiens
tgaataattttctggaccaaagagtaagaacatttttgaagttcctgataaataatgccaatcgatgaaggcattttttataacttccctagaaataagcyattctaaactattcacaaggctgagcgcaacctgcccaaaaggaagggtattattatattatcagatcatgcgtctgctccttaagaagtattgtgagat

SEQ ID NO: 10792 - DNA, 201 bp, Homo sapiens
cgtctgctccttaagaagtattgtgagatgctcttgtgattttctcccacctaaagagatttttatgttattcttggcaactgaaaaataagcaaagcctyatcatttctttctttggactacttttttggtttcctttgaccactgtcagttcagcaatattttgaggtggaatcagcactataattagacacaacctaa

SEQ ID NO: 10793 - DNA, 201 bp, Homo sapiens
taagaagtattgtgagatgctcttgtgattttctcccacctaaagagatttttatgttattcttggcaactgaaaaataagcaaagcctcatcatttcttyctttggactacttttttggtttcctttgaccactgtcagttcagcaatattttgaggtggaatcagcactataattagacacaacctaagagtctgagaa

SEQ ID NO: 10794 - DNA, 201 bp, Homo sapiens
tgggtaaatcctagagatacttggactcgaacagcagcagcctagaccaggattttcaaccttgcctttgggggctgggaagattcactacagaggtgggktgtcactcaggcattactgctcttatgggagagttcacatctctccatcagcattttctacacattcagagccacagaagaccacaaggcaatgaggaca

SEQ ID NO: 10795 - DNA, 201 bp, Homo sapiens
agaagaccacaaggcaatgaggacagaagagacatacacagaaaggagtgacaggagttgtatgttttcttcttggaaccagaagaaagtgaagttcttgyccagggaactgagcaagtccctttccagtcatactttcaattccacatactctatttatatctataactaaagaaattatgataatttttaaaattgcta

SEQ ID NO: 10796 - DNA, 201 bp, Homo sapiens
caaaaagtggtaagaaacaaaaataacagactagaagatactctcaaaacggtctttacattttggggacatgtggatagttcaactttcagaagtccttyctctactcatgaaggtgctctgaattaacagacagtctaatttccttctaaaacagacacagaaggcacagagaagatgaaagaaataacattgacaggt

SEQ ID NO: 10797 - DNA, 201 bp, Homo sapiens
cattttggggacatgtggatagttcaactttcagaagtcctttctctactcatgaaggtgctctgaattaacagacagtctaatttccttctaaaacagamacagaaggcacagagaagatgaaagaaataacattgacaggttttgttggtttttaatcactttccacactcagaaaaaaaagtcttatcattctgaagc

SEQ ID NO: 10798 - DNA, 201 bp, Homo sapiens
tgaaagaaataacattgacaggttttgttggtttttaatcactttccacactcagaaaaaaaagtcttatcattctgaagctggttagaagttgaacaggyatcttttagagaggatcacctcaagtgatgcctacaggactccgatgctttacactcacagatgacctggggaaaggaagaatgagcttgaccaccagat

SEQ ID NO: 10799 - DNA, 201 bp, Homo sapiens
ggatcacctcaagtgatgcctacaggactccgatgctttacactcacagatgacctggggaaaggaagaatgagcttgaccaccagatctgcacagggtawgatactgggcatgactggcaatctgcaaagtgaaagaagcaggctgacattttattttaaaataggatgacgctctggaaaagcctcacatagaaaagca

SEQ ID NO: 10800 - DNA, 201 bp, Homo sapiens
aaaatttttcaaaagttataagatttaaaatatgggaagaaaacacaatagaccacttcgataactggaattcataaaaaagcagaactattatatagcamcataataaacaaaagtaaacatattaaaaacagttcatgcttttaatatctaaataattcttacaaatcaaacaactgcaaagcaagaagaaaaagaaca

SEQ ID NO: 10801 - DNA, 201 bp, Homo sapiens
gcttctgatgtcttagccataaaatttttgcaagattagtggcctacagtatttcccctaaaccataataattttgagcaatgcagaggtatgatgaaaayagtgcttatggaagaatattctagcagcaatttgcaggacagatccaagagaagaaattcagagagaacaaggaaagagagattattgagaaactccaat

SEQ ID NO: 10802 - DNA, 201 bp, Homo sapiens
attattgagaaactccaatttcaacatcttgaaaactcaaattgggtttatatcttcagtaatagagaggaagtggtatacctgagcctgatttataagcrtcaatagaacttggtgacaattgattccagaaaatgtatgagagagcccccaaaagttcctagcccaagggaatggaaaattccatatcagttttcttat

SEQ ID NO: 10803 - DNA, 201 bp, Homo sapiens
cataccagccccagactaacttgggagttagtgaggggaaagggatgtagacacattgtcacagcaactggcagcagcagctaaatcagagttccagagtrgaggctgaagtacaggataattgccaagtgacacggacagtgcccctggccaactctcatcaccaaattcaatgatgtgattttacgcactgttccaggc

SEQ ID NO: 10804 - DNA, 201 bp, Homo sapiens
agcagcagctaaatcagagttccagagtggaggctgaagtacaggataattgccaagtgacacggacagtgcccctggccaactctcatcaccaaattcartgatgtgattttacgcactgttccaggctgcctggttctaaggcccttgcagagattctgtaaattgctcaatatgctctaaattattcctttccaattt

SEQ ID NO: 10805 - DNA, 201 bp, Homo sapiens
gccttgcaatgttgtaaatttgtctacacatttactatattgtaaatccctatctacacgattaggttataataggcaagctggaggaaaagaatcatttrctccattacgctacttgctatgcagatttgaaacctgtaagattgaaaattcttatttaactgtaagttataactcacatttctaaggttgaatatttgt

SEQ ID NO: 10806 - DNA, 201 bp, Homo sapiens
cctgtctgcagtaatcaaattgattttgcttatagaatctgaaaccagtattaatgtaaagaaagaaacaaacggaaaataaagggtgtaatgtcagcccragtctatattttttaaagcagataaacagcttaatatctaagcactaaatattatcacttgtttcagttttttatattaaaaagataatattttaatagt

SEQ ID NO: 10807 - DNA, 201 bp, Homo sapiens
cattcagtcaagggtcctctgagctaaataaaattttctgtgactaagccagacagaggtaacatgaaagaactacttactactattaaggaatggaaagracagcactatttgacacttagttcttcccttctctcaaatccctcttccttccttattctccaggtgtgagtttaaagaacaacttacaaatgaggtcac

SEQ ID NO: 10808 - DNA, 201 bp, Homo sapiens
ctcagacatcagttaaaaagctctctctgggtggctctctttacctgttcttgcgttaaatatcgaggaagaagagtcaagttgtttctgcctttcaagcrtacaagattcagtgatataaagggcacttaccacctgaaaaaagacctaggctgtaaggcagaaggcctgaggtctaggcctggcttatcctctaacata

SEQ ID NO: 10809 - DNA, 201 bp, Homo sapiens
ttcaacccataagaacttactgaattggatcacaggattgacttaaaacaacaagatgagcatgagcttggaagcaaatgcaatcatccaggtgtgaagtmaagtcagtctcatctggcaagtaaccatggaagtggcagtgaagggatggcaaggacttggcagccatggggactgatctggttataagagcaacacaaa

SEQ ID NO: 10810 - DNA, 201 bp, Homo sapiens
taaatataatgccggaggaagcatatagactcactgtgaacaagcaggtgcctggagagtcagcaaatgcatcggcagagcagttacaatgataagaacasgaagaaccttcgaaaatgtttggaattcgtggaccgggtctttaacagtctgaacaatgacctgcgagtctcacagcaatccaaaaggcagtcccactga

SEQ ID NO: 10811 - DNA, 201 bp, Homo sapiens
aaacacaaactccaaattactaaagcttattttttaatttatgaactcttccaactgtctaatatccaggatgtagtataataggtgtctttaacacctcrgtagaaatggctccccttgtgtctaccttgcaattaatttatgttttccaaagtgttgatgcttcaatattcatatttaagctatggaaattttaaaaac

SEQ ID NO: 10812 - DNA, 201 bp, Homo sapiens
aggtctagggagtcacttggatgacaagggtggcttcaaaaatggtgctaaaattattacatgaatcgtaattaataattccattcaagttcttccttgaytactacaagtaatcaagcactagccatggcaatgcttactcgcatgcaattttgttcacagtgtccactccttaggttcattgctcacatgagacagtat

SEQ ID NO: 10813 - DNA, 201 bp, Homo sapiens
ataaaccataacatacttttagttctttttcaaaagtaaaacactttcactcactttaagatatttagaaactatagagaactgtaaagcagaaccaggtsttttaactacagtcaacaatttgctgtaaataattcttgttttctcattatgcaattttgtgtggccatatataaacccattttacatttaaaaattgca

SEQ ID NO: 10814 - DNA, 201 bp, Homo sapiens
atattctggtgtatttaggggaaaggggggggtagaaaaagaaacaattttaaaagtataaatggtatatcagctgtaataagaaatatggggaaaaaaaytaaagcaatataaagggcacagaaattgtcagaaggctgaggagaaacagtagcggttgctattttgtttcaaatgttcagaaaaggcatctataacaag

SEQ ID NO: 10815 - DNA, 201 bp, Homo sapiens
aatactgaaaaacaatttctagcaaatgtttaccttcatacttatattgtctacctagtacctccctcttctgagtgtggaacccctcttctttaagacaytgctttaaacatttagttcccaaattctaaaatgagtccactaccttggacatagctgaatggcaagggaagggagttgcgagatgaatagctaaaaata

SEQ ID NO: 10816 - DNA, 201 bp, Homo sapiens
tcagtattttcataggaaagaaaagatttgcctatctaatagacaaaaatgaaggcttgtaggttttttttttaatttgtattgatttttgccatcatttycaacaggtttgaaagcatgtttactggtcactcatattaataagtgtatgcaagtatgtgcacatggatgtgggtgaaaactgttttttgagcattcttc

SEQ ID NO: 10817 - DNA, 201 bp, Homo sapiens
gtcatgtggctatggcaagttacctaaccatcatctgtgaaaccaagataataacagaatggagctgggaatattaaatgcaatcatctatgctgcaacayaggagacaagtgttttccattgtaatccattatttaccctttatggagaataaaactttcaacactatattttccataaataatatgtgttttgtcagag

SEQ ID NO: 10818 - DNA, 201 bp, Homo sapiens
atttaccttattactaccttgctgaagatcttcaccttaaaatcttttaacaaatggcttcaacaaaaaacaattcccttgttttccacaaattttgcaawcttatgattatgttgatggaatctaatatattagataacttcattcactgactccatgtgttcatctaccatttatttctcatgcttctgcaatctcatc

SEQ ID NO: 10819 - DNA, 201 bp, Homo sapiens
ctataaatgggaaaaataatagtatccacatgttgggattgatgcgctgattccctcaatatatgcaaagtacacgttatgtgctatgtgaatgtttgcaytatggtacagtagtggacaatcagctagacctgagttcaaactgctgcttcaatctcaaatagatatgtgatttgggatgcagaagagaaaaatgtagta

SEQ ID NO: 10820 - DNA, 201 bp, Homo sapiens
atatccaaattacatccctcatattgcctttcatattcagaaagtttttaaaaatcttttacaatgcatgcgtcttaattttcagttctaaacccttggtyactgttcacagaaagccagggtgtataagtgccacttctgaatggtaccactacgataccccaacccatacaccaacacaaccccctgctcagatatttg

SEQ ID NO: 10821 - DNA, 201 bp, Homo sapiens
ttaatggttactttataatcttgtattattattcttactggcataataaaatacatcagagaacactgttattaaccccacactgtgatatcttctttatygaaagaggtaatctgtagtgcaactaaaaacaaagtgcaacattccccacaagtgacttcaacttcagaaaaagttggcctatataatttctatgtagca

SEQ ID NO: 10822 - DNA, 201 bp, Homo sapiens
aactcattaagtaaaatgtcttcctattaggacaggtgtcttcctgactacggcaagtttcagtataagttctcagacatcacaattaaaacaagctgaaytctcataataaggaaagtgatataaatctcattagacaagaaatttcattatgatgaaattaagtgtttagaaaaacaaaatgattcctaaatcttggca

SEQ ID NO: 10823 - DNA, 201 bp, Homo sapiens
gggatacactcagtccatttgtcaacaaataccctctgagtactaaggatgtagagatgaactagatgcaatgccttctctccaaaagcttactatacatyagaaaaacaaacaaatgagttcaataaatggttcaagtatatgatgaagatgatgaaagtatgtatgtggttctgagagggcacaaagaataaaaatggt

SEQ ID NO: 10824 - DNA, 201 bp, Homo sapiens
atccaatcatctcattcactgcatgtcatttttgagcacttattaggttctgcgcaaggtgctgaataagatgtggtccctcatgttcaacgaccttacakcccactagcaaagagaagcaggaataaataatacaatttgatacgtgctataatgggatgcattgtgaagggctacaaaggcacagatgatggcacagtt

SEQ ID NO: 10825 - DNA, 201 bp, Homo sapiens
ttaggtaattttctccataatatgcatttattctttacattgatttatgattttgttttgttcttttacgtattttagaataacctgaggtcctacatgtktaaacctttaagaaaatatttatgaagttatacaaagtatgacacctgccatgaggatataaatcatatctatgtatcaacaagagaggggaaggagagc

SEQ ID NO: 10826 - DNA, 201 bp, Homo sapiens
ccaagtctatataattataaactcagttttaacctctcaggattctttgaggtagtttgcaatgattcctttaaatatcataatgtaatgcaggtatccasactctgccatgtatagatgttctttaattgtgttatcttctttatgggaaggtgagaaaatctttctaatcagtgaagaatacattaaatatttcataat

SEQ ID NO: 10827 - DNA, 201 bp, Homo sapiens
ttatcctaaaaataaagcagactcccttcgcctcccaacttctaatagcacataaggttagaaattttaaacagttatttcctattacgaaaagagtattyccaagcttctaaaagctggaaaatacaaagaagcataaattagaaaataaaagttacctgcaaccttactaacattaacatgtatatatctgtgtattgt

SEQ ID NO: 10828 - DNA, 201 bp, Homo sapiens
ctattacgaaaagagtatttccaagcttctaaaagctggaaaatacaaagaagcataaattagaaaataaaagttacctgcaaccttactaacattaacakgtatatatctgtgtattgtattcctttgttttttctttcttatgagctatgtataaaacataagcttaatacaagtaacttgcagacaaagaaattatga

SEQ ID NO: 10829 - DNA, 201 bp, Homo sapiens
gagaaggaaataatcaaaatctactggtagagtcctgcatgggccagagcagaggccactgctgcaagaacccacgcaagagatgagaacctgtactcaarcatcagcagcggcctcaccaaagtagtgaggcagctgaaaagcatcacagaagcccctcatgacacactggaaattacagacagctcactcagcattcac

SEQ ID NO: 10830 - DNA, 201 bp, Homo sapiens
gttattctccaatgtatgttttatttaccattcataaaattaataaattagtcattggttataaatttataattaaaaaacaaatcaatgacttgaaatayactcaatagttattctaaaaacaaaacttacatttacctttagatgacaatatattaaagctttattgaatggttataaatttttgtggagaaatttaat

SEQ ID NO: 10831 - DNA, 201 bp, Homo sapiens
ttaaatatatcgttttgattttcttaatctgtaaaaaccaggaaaaaaggtattaaaagtatgagaaattaaaatgttagtgctattccttgctattacastagttcatggaggataaccttaacctagttatttaatgtcttctcagcttttttgtgtaaaccaggccttcaacctgcctcacaaacatgacccaaggaa

SEQ ID NO: 10832 - DNA, 201 bp, Homo sapiens
aatctgagaacagttctatatgaaaaaatatagaaatctattacattcttaacagtacagctaataaatgtttttcttatggccaaccagcatagcacaaygatagctctcacacccatacaggcaacaagagccagcctggcacactgcactgggcattcctggtgcccacacttgtgttttccccggcttcagtggcat

SEQ ID NO: 10833 - DNA, 201 bp, Homo sapiens
aaaacagtttctgacattatcagtgaccatactcaaaaagctgtttaattctaatccaagaaattaggatttattcaaggaaatttcaaaagtgccttctrttcttattatcttggaattataagaactctatggtttattctttaaataattatatcctttagaataaggataaattctctattctgtgaaatggctaga

SEQ ID NO: 10834 - DNA, 201 bp, Homo sapiens
tataagaactctatggtttattctttaaataattatatcctttagaataaggataaattctctattctgtgaaatggctagatgaaaatattgcaaaaccyaagactttcctggatgtcatctattaatattacaacaagaaacagatgcacctctacttagaatcataaactcttctgctgctaagaatcctgagacttg

SEQ ID NO: 10835 - DNA, 201 bp, Homo sapiens
tgatgaaaacttaaccactgaaattttaattatatgctgtatttagcattttcaaatatcacattcagaaaatttcagactgaacacacactctggggaaktttgtgaatcactgtgttgttattaagagaaaagcacatgctaaacaaaatatagcggcacagcgaggcaaatgagaggagacgtgctacaagaaacaaa

SEQ ID NO: 10836 - DNA, 201 bp, Homo sapiens
tcactgtgttgttattaagagaaaagcacatgctaaacaaaatatagcggcacagcgaggcaaatgagaggagacgtgctacaagaaacaaattcttgcaygaccaggctatctgcagctttgaggagaagagttggtagtacatgaacccatcacacactagtaacaatagcctctaatttccctctatcacttttcttc

SEQ ID NO: 10837 - DNA, 201 bp, Homo sapiens
caaaatatagcggcacagcgaggcaaatgagaggagacgtgctacaagaaacaaattcttgcacgaccaggctatctgcagctttgaggagaagagttggyagtacatgaacccatcacacactagtaacaatagcctctaatttccctctatcacttttcttcataaaatatattcacctcccacagattacgcgaactg

SEQ ID NO: 10838 - DNA, 201 bp, Homo sapiens
cagccaatttgccaatgagaacaattggcagtgttctactttcaacataaattcctaaggtcttctccatttgggggcaattacagctgtaagattacagyttcctacagttctccaaagcaaagcagttgcttctaattattccttcattttaaagcaattaagccaaatgttatttgatttcattcaagtgaataaata

SEQ ID NO: 10839 - DNA, 201 bp, Homo sapiens
agggctataggtattcttgacccttcatatataaacaggtggtgggaagggtaagaatgaaaatgggaaacaattaccctacagaagaggaggcgatcccygagccagaaaacaggctaaccaacttcgagaaatgtccccaccttctatccttcaggcactaaggtcaagggccagccctaaactcaaggaaagctgagg

SEQ ID NO: 10840 - DNA, 201 bp, Homo sapiens
ccttcaggcactaaggtcaagggccagccctaaactcaaggaaagctgaggaggaaggagccgccagatgggaccaagaaggcgagaggcaggagtgtctyagggatctagattctcaagggaggaaactatcaggaccacaggggtgggttttttggggggctagggaatagggataaattcccaaagactgaaatatct

SEQ ID NO: 10841 - DNA, 201 bp, Homo sapiens
gctgtaaaaactgcttcctgaggaaggtcatctcttagtcctctcattttttccaagtgaactctagaagattcgagaacttcttttgattccagaaccayttccgaggccaacatccttcggggcctgtgacgagctacacctttttatggacacttaaaagattagagtttctgtacattttaatgaccaggtcctcag

SEQ ID NO: 10842 - DNA, 201 bp, Homo sapiens
tgttctgccttgatcgtgctattaatgttcatgagcagatgaaaatttactcagttttcagtaatatttgaaatttttacacattggaaaccaacctaatmgacactcttcgttcaggtactagttatcaaatcctaagtatttttgaactaataattatcctttacatgtatcagagaacattaccctaagttgcttgct

SEQ ID NO: 10843 - DNA, 201 bp, Homo sapiens
gtaataatgcttggcaaatgttatttttagatgatagcagcatacctaaagctatgaaccaaaggtaagcaatatgaagacatcttgcacaatctttctawacaaacatgcagcatttcctccttaccacttcctgggatgtataaaatgcataaaaatagaagcagtctttctttaagggtgagcttttatcaagacttg

SEQ ID NO: 10844 - DNA, 201 bp, Homo sapiens
tactaaaataaattgtctaaagtcaacagctaatcagaagcaaaaatggaacaaaaatccaatttatagactcttagttcaggcttccctacttcaggttsgtcattctatgcaacctacagggaatgagactggtagaaaagaggccacttgacatggctgatgtatgtttcaggatgatctgagtacccgccacatgtc

SEQ ID NO: 10845 - DNA, 201 bp, Homo sapiens
gcttccctacttcaggttggtcattctatgcaacctacagggaatgagactggtagaaaagaggccacttgacatggctgatgtatgtttcaggatgatcygagtacccgccacatgtctggtgttatcttgggaagcaggaaaggaggaggtagaacttttcttcaagtggtgaacaactgagagctcaccaatactagg

SEQ ID NO: 10846 - DNA, 201 bp, Homo sapiens
caatgttcaaacatatggttgagggaaaaaatcaagttacaagcagcagtgtatacaagatgacctcatttttgtttttaaatatatctatatacacacamacataaagaagtacagaaaaaaaatccataaagacataggccacaatattaacaatgtttcatctgatgtgtaaaattatgagaacttttttccttatat

SEQ ID NO: 10847 - DNA, 201 bp, Homo sapiens
atggaaccataatcttagatgaacaacgttagaatttgcactaattctacggaatttcagtaattcggcaaatgtcgggcagtgacacaacatttcatgayggggacgcatctaccaacttctggcgataagggccacccttccctctgtacttacagtcccatttcatacacagtctttgattaaatattcacatttttt

SEQ ID NO: 10848 - DNA, 201 bp, Homo sapiens
caaaagaaatgtacatttaaataacaagacatcatttcacgtgtcagactggccccaaaaaaggaaaagataaaagaaaaaagatacactgaagggttttyataaaagggaaattgtgtgatatataaccaatgtcttcaacgacatccttataaatacaactgtgtgccttccctttctgtcctttcttgatttgagcca

SEQ ID NO: 10849 - DNA, 201 bp, Homo sapiens
aagactcaagcagtgaattgttaaaatggaggagctttaatctcctcttcagagaatgtatgaatttataaaactgtatagtttctgaagattttgaccaytatgaaaaggtattcagaatcgatgggaaaaaacaactatgacaaatcagtttttctaaattatatattggtgtcaaatggcacctttttcctaattatt

SEQ ID NO: 10850 - DNA, 201 bp, Homo sapiens
cacatttgctcaaatgctcctgtgactgctagtttcctgagctacaaaacgggtatgacaaggtttattaatttaaatctcatagaaaaattcataaaagmacaatggatatattggatttggggaaaacatatccatagcttcttaacaaaattttgaacattgctataggcagttatatccatattttccagcatgatt

SEQ ID NO: 10851 - DNA, 201 bp, Homo sapiens
gtcactggcagatccaatatttaaaaccaagtctgtcttaacgctgagtgttttacccactctatcatactgcctcccacttttcatatttcaagacctcrgtttcatcaactgtattaatgggtataatatggagaagataggagagttaaattgtatctaatatgtcataagtggtcttataaaagcatcagttactgc

SEQ ID NO: 10852 - DNA, 201 bp, Homo sapiens
tacacatatacacacacactcacacaatgagtaataatcatctaacattatttttgaaaataaaaaaagaataagcccaagagaaaaacatcataacaacrgttgggtagaaataaaagaggatttgattacatcattatttttgtatcacaattaaattaacctccacacttcctctaccttcttttgccatgcaaaaca

SEQ ID NO: 10853 - DNA, 201 bp, Homo sapiens
tttccacattgtattcgcttgaaacttagggacttagtgtttagctaggagaaataattaatgtatatgtaaaatatttttgtactatcaaattgaatacraaagaaacagttaacacaaccagactcagaaatgcatggttgctcctagaggctaccagcttgtaccctccttctggtttgcaattaagtagactgtaag

SEQ ID NO: 10854 - DNA, 201 bp, Homo sapiens
gagaggagggagtgtgtcggccttattcactgcagtatccgcagcacctagaccaccacatggcacacagatgctcagtaactacatctgaacaagggaayggctgagtggcagacacaatgcaagcaaacacttggaggtgaggagcttggattcaggatgagggatatgagatacagttgaagttgcaggttggaggta

SEQ ID NO: 10855 - DNA, 201 bp, Homo sapiens
tgctgaggactatgtctgattatgatacattttttccttttgacctaaatacattaaatttaatcagctttaaaaaattctcttgattttgatttaagaaraaagcttaagaatgacttttattttgattaatttcattttgagattcccttctctctttcattctaagtctttgctgtcttaaggagcaactgtagttga

SEQ ID NO: 10856 - DNA, 201 bp, Homo sapiens
gaaaaggtagaatttggatatctgaaagaacagagatggccttctagacaggagacagcatgagcaaagcaaacttactcctccatattgcctcttagcarcaaagggatccaaattggcatactggcatattagttattataggtcactaattcctgaataaaccaattgctatggttaaccataataatttttaaatgt

SEQ ID NO: 10857 - DNA, 201 bp, Homo sapiens
taaacaaaagttgataaagcacaaatggtacttgagactgtttttagtttctgatgaagtatagtacctgtcatagctccgcatatctgctactcacagargtcaatgtaattctttccaattttctcttataaataatttgtcttaaatacatctaaacctaatgtaataaccacatgccatccttcagactatcgtttc

SEQ ID NO: 10858 - DNA, 201 bp, Homo sapiens
gaaagcactttcacaatggggcaggtgtcaatcagaaagcagaaattccccaacactgaaaccctcactatccacagcaatgacctgcacatcgacttctygggctgctccaggctggtcttgtcctcctgaagcttccctgggttttcaattacagttctttacaagtctaagcatattttaaatatgttgaagaattta

SEQ ID NO: 10859 - DNA, 201 bp, Homo sapiens
tcagattttcttgagatttatgatctcatgttcttgaaaaaggcctagcacctccgtgttcctgaaataattgatatgtctgttacaagtgttattttcckgataccaacatctgtcttaggaagaaaagtacaaactgatgaaaattccctgctatatttaagaaattcaaaagagctaccagaatttgcatctaataca

SEQ ID NO: 10860 - DNA, 201 bp, Homo sapiens
taccttgcattctttcatcatgtcccaactggcttaatataattctgagaagtggtgttgctgaggtgcttggagcctttgcagaactccatctttaatgycagcacagagttcaatgtgcattattggtgcaagagaaacaattttcatggaagctttaaatttcaagtgaaaatttaaataatttttacttgtttaaat

SEQ ID NO: 10861 - DNA, 201 bp, Homo sapiens
aagacttaaaatgcattgtgtgcttctaatgaaactaaataaactagacattaagggatagtttcttactatgataaagaatatcaaactaaagataataraaaacatatctaatataaaacactatcacaattatattgaaaataaaagtttttgaagtcaactgtatttttcaatattgttctggaagatctaatcact

SEQ ID NO: 10862 - DNA, 201 bp, Homo sapiens
cagaacttaaactctgagactaaaatcttatctaaataactgggagaagaaaacaccacaaaaccaaataaaatcaaaccgttgcattaatcatataaggstcaaaatcatattagactgtgataaaataaagtgatcaaaaaatcttgaaataaattaacttgtaaattaagatttggtttactttgctctaaggaaatt

SEQ ID NO: 10863 - DNA, 201 bp, Homo sapiens
ccattgtctttaggcaagaataaaaaatacaaacaaattactgatgaatctgccctaccttcatggcatcaagagccagtttcagatttgccttctcagtyggatcagtggtatgtttgaccagttcctatttggaagatatggtttagtactactttcatcaaattaaaactaagacatactaaagaaaacatttttaca

SEQ ID NO: 10864 - DNA, 201 bp, Homo sapiens
tcataatgagcttctgatcggccttctgacttgcagtctctcctcactacagtccagtcactctattgtcatcaggggtaggtttctataatataaatcasatcctgtctctaccctactcagacttctgtgatgccccacaaaagcttcaggttgtcacccatacctcctagactcctcatgatctgaattctgcaaact

SEQ ID NO: 10865 - DNA, 201 bp, Homo sapiens
agagatgactaataattttgcagctacagttcaagaaatttaatatacaagatatacaaagcacagccgacgcaaaattgtatttcacatacaggtagtaratctttttaaaatgacatttcacaagcatcagcagagttgacagactaatacactaagacatttctttggagcagaactaatgagtctcctggtatagct

SEQ ID NO: 10866 - DNA, 201 bp, Homo sapiens
tatctgatctcccacctgccacatacctgcagggtcacctcacccactgcagcaccccaagtcagacaacaaacagctgtgcatgtacccttgccttcagyaccctctcttttcagctgtgggatctgataacaaataatttggtagcaatcatccttccatggctccgttcactagtgtagatgaaaactagtagaagac

SEQ ID NO: 10867 - DNA, 201 bp, Homo sapiens
tatgataatagatataatgcatcctaactctcaaaattttaacaaacacaacttaaagaggttctacatgaggcttattcagaatgatagtaaaaagcgaraaaaggcaaaaatctgtttctaaattaaggtaatctaattccttacttcagagacaggaacataaaaatgaagtctctccagtactctgtagaaggttca

SEQ ID NO: 10868 - DNA, 201 bp, Homo sapiens
ttctaaattaaggtaatctaattccttacttcagagacaggaacataaaaatgaagtctctccagtactctgtagaaggttcatgagagtaccagccacayatacacttatatctcacccacttcaggaactggtaccatatatatatatggttgtagttagaaactcctggctttggagtaagaatacctggagccctga

SEQ ID NO: 10869 - DNA, 201 bp, Homo sapiens
cagctatgctcacctttactagcctctgtaaaatgcagataatagctaactgcttcatggagttactaaaagaattaaatgagatcatgcctatcatatgyttaactcagtaaatgtgaatttttattatcatgtaaaataaagttattatacaaagataacatttaattgaattacatatagatgacgacaatgtattac

SEQ ID NO: 10870 - DNA, 201 bp, Homo sapiens
gtgatattgtacactgataaaactacccattttaaactattctcttcatgagacattcgggcaaatgtccactctttgcttctctagcacattagtgctgytgatgttatttgtaattaaaacaagtcatctaagcaggagcagtatgttatggctacctttaaggtcctgagttaagaaaggcacagccacagtaaccag

SEQ ID NO: 10871 - DNA, 201 bp, Homo sapiens
gctgaatgcctatacccaggccccacaactctatcttacaaattctagagatatcatgttttattcagtggttattattttgttatagatccctttgagartatgatgaaagctatcactcatttactcaaaaaattaaacccacctatctacacacacacatacacacatacacacacaaaaacacatataaagtctgca

SEQ ID NO: 10872 - DNA, 201 bp, Homo sapiens
accatatattttgaaataatttcttccttttttaacaaacaattttcaacaaaagaaaagactgattagaattctgctgataaattgccactgattgggtwaatcctagagatacttggactcgaacagcagcagcctagaccaggattttcaaccttgcctttgggggctgggaagattcactacagaggtggggtgtca

SEQ ID NO: 10873 - DNA, 201 bp, Homo sapiens
acctaggagattaaagtttatttataccaactcatttttacttcaagcataaagtacaccattaagtactaacagtattttagtttctgtgtgggcacttyctttgcacagaccacagtcctgtacagtatttcctgtaaaataaccacagtattttttttctcataatgggggcatttggcagctgcagtcacaagtagc

SEQ ID NO: 10874 - DNA, 201 bp, Homo sapiens
gtgagaggatgctccagtcaaacggcaaagaatgtgcatgaaagcatggaccacttggggcagtggaagcggttgagatggacacttctctggacaagagygctgacagaaggaacagaagaggggagctgggatgtccatggcatgccaaagagatcttggctttgtcctagaagtgatgaggttaaaaggtcttaatta

SEQ ID NO: 10875 - DNA, 201 bp, Homo sapiens
atttataattgttatattttcctgctgaattgaccccttatattattaatatagtcaccttctctattaggcagagtctaaagtctttgactaataatctstttatctaagtataattattccccccattttttggtttttacttgcatagaatatatttttctatcccattactttcagcctacatgtgtcttcataggt

SEQ ID NO: 10876 - DNA, 201 bp, Homo sapiens
ggtagcaatgcaggaaatataatccaacaatgtctccatatgtgcctaggaaatgagatgcaatttttacacaaaataatgtaaatgaatttatgataagktttattgctatcattagtgatggtttcgctgatgatggtttatgttaggattattatacacacacacacacaaacaaatcacaacacagaaaaacaatca

SEQ ID NO: 10877 - DNA, 201 bp, Homo sapiens
agggaagcaaactaaaacttgctaaccgccaggctcggggcaaggcgcttctggcactgtatctcctttaattctcactctaaaccaatgaggtaggtgayacgatcctcatttcataagtgagaaaactgcctcccaggcagccccgcctttttcagagaaggatttgagagattaaataacctgatgaagttcacacaa

SEQ ID NO: 10878 - DNA, 201 bp, Homo sapiens
taatgtttagaggaagttgaaggctacggagattaagccacttgccaaagttgagcatgaaacagcctccaaagtgaccctagaacccagtttactgtgcrttttctggacagaactctgaccattaggccacacttcccagttccttggatgaatctcaagtaccaaaaaatgtaggcataatgtctgggggcatcctgg

SEQ ID NO: 10879 - DNA, 201 bp, Homo sapiens; identical to SEQ ID NO: 4230

SEQ ID NO: 10880 - DNA, 201 bp, Homo sapiens
atggtgaaaccccatctctacttaaagtacaaaaattagctgggcgtggtgatgtatgcctgtaatcccggctactcaggaggctgaagcagagagaattrcttgaacccgggaggcgcaggttgcagtgagcggagatcgcgccactgcactccagcctaggcaacagagcgagactccgtctcaaaaaaaaaaaaaaaa

SEQ ID NO: 10881 - DNA, 201 bp, Homo sapiens
aggcaagaaaatcaccggaacctgggaggcagaggttgcagtgagccaagattgcaccactgtcctccagcctgggcgacagagcaaaactctgtctctgraaaaaaaaaaataatggaggaagtataaactctctcctgttgcacaaatcccaagtagaggttttggaaatccagaatccaaacaaaatgcaactctgcc

SEQ ID NO: 10882 - DNA, 201 bp, Homo sapiens
ccacctgctctcagagatgcgtcatgacctcatgaccacacaggaaagggctgtacttgcccatggttgtttaggacacagctgaggaaaaggggttaaarctccagggaattctcttagaccccattcattcatctctcaggtgtttcttgagcctcttatccatgttaggaactgtggtcattttgtggccactgagga

SEQ ID NO: 10883 - DNA, 201 bp, Homo sapiens
ccagtttgaggttggttgttggtattgctgaaagcagtcttcatgaggttccaccttgtagcagatggtcttaaaagtggagcatatctttgcgcaattgractgctttagctgactatccaatatgaagtagaaaagcggatttccagtttacattatttgtcaaaatagaattccctaataaaacttttggttggcttt

SEQ ID NO: 10884 - DNA, 201 bp, Homo sapiens
cctttggattttaaaaggcagattcaccttctcagcagtgcatgaattaaggggtggtttgtctctgggttttaaaggaactataaacaaaggtgacttasaaagccccagctccctgaaagcaccccctgtgctgcgtgaaatccccaaggggtactggggggtaagaactgggaaagggaggtaaatttccccatctgc

SEQ ID NO: 10885 - DNA, 201 bp, Homo sapiens
atttaggaaaggattctgcacaggtcccttttcagctccaaggagcccgtgatgtctggaactttaccaccaccaggagatctttcacttcagggctcccrgctggtagcatcaatacttaggtgatcttcaaattactgcctgtgtttaagggcaagaagaaagaggtggctaattaaagtaaccaaacttcctggaaag

SEQ ID NO: 10886 - DNA, 201 bp, Homo sapiens
gagaggggagcccgtttctccattggaacagaaggccagtggcagcagaagccctttgcaaatgtgtctgggcggtccatagtagttattctgcatattcwtgcatggcaaactatagagagtttgagactgcagcaggacggattgaggttaggctcaagaaatgcctccctaaacgctgtgcactaggaggggaggggg

SEQ ID NO: 10887 - DNA, 201 bp, Homo sapiens
ggcggcggcggccgggaactggaggaaggagaccctggcttcgcaggggccccggctggggcagaggcgaggggcctgggggggcgctggctttggccccscctggggcaggatggtgaatctggagtccatgcacacaggtgaggggcggagggaatgagctctgacaggtgtcactgcgcgtgggcaggggtgaaggag

SEQ ID NO: 10888 - DNA, 201 bp, Homo sapiens
agggaacccagcccctccattcaccttgctgttcctccttccacagctgggctaaggcaggagctgccaggcagccaggttgggcttggcttggggcttcstgttagggtgggccttctggaggtcacagggcctgagcaaagaacaagtgaagaaagcggtacctgacctggccatttctaacctagcaacttactctca

SEQ ID NO: 10889 - DNA, 201 bp, Homo sapiens
tatgtcccgatgtcccgggatccagcagcattatttcccccttgtttttgcctctccttatcctcagtaacgtcatcctgttcccctgggaacaacagcargccttcatctcctggctcaggactccacgccagcagccccactgcatctcaaaataactccaaagcagcagtgaactccgcctccagttttaactcttca

SEQ ID NO: 10890 - DNA, 201 bp, Homo sapiens; identical to SEQ ID NO: 4231

SEQ ID NO: 10891 - DNA, 201 bp, Homo sapiens
aagcccctgctggagaagtggctgaatgatgcaggtaggcctcgcaaacacggatgccaggggccctagagggctctgcagggaagggccagtgacttgtygtgttggggcttttgggagtttgatacctaacacccccttcttctcctgagactggagccgatggagaaacaagacacaggacacaggcaagtgtagatg

SEQ ID NO: 10892 - DNA, 201 bp, Homo sapiens
aaggagaagacatgttcatgaggagtcctgtctgggaaggaaagcgaggccctgccctcctgtctgcacacagctttctgggcttccatgcaggccatccygtggtgacagaccacttactgggacttgaagagacgaagagaaaggggtgagcctatgatgggtgctgcaaagagcactggagtgggagtccagagacct

SEQ ID NO: 10893 - DNA, 201 bp, Homo sapiens
ctctaatcctgcccttcattgtgcctgggaacaaggaaaatgagagataccacagcagataagaatgaatttgatgagaaggggaaactccatcatcaggstccaagtggagcagatgcatcctcagggtgagatgcctcttgagaagggggccacggccaaacttccgggcaacagaaatggttgattgtgttggtcatt

SEQ ID NO: 10894 - DNA, 201 bp, Homo sapiens
acggattgaggttaggctcaagaaatgcctccctaaacgctgtgcactaggaggggagggggtggggtaaggttgcaggtcttcctcagagctctgtgacygaccacaaagtgcagtgtagatttgtctggggagggttccatagagctctaagtgtttaccttggcgtcttccctcaatttggctggtcttgaaaactcc

SEQ ID NO: 10895 - DNA, 201 bp, Homo sapiens
tctcactcacccctggcaagtgctgtccgacaggtgaagggttacagtgtctcagggagtttcggtgttggcccatttttaggctgagacccaaaagctcrtcccacccatcagcctcagcctcctacccaacaggaacaggttctcagtgtcttagcatcctatgggactcaagaagaggcttgataggttatctcaccc

SEQ ID NO: 10896 - DNA, 201 bp, Homo sapiens
ccaagaacatgaagatggacactaggagagagggctgtggcttctgctttcccagagtagcctggtcccaggaggtccaggaccctcagcctgcagcctgkggggagtgcttcctctcgagctttcttccctggggttcacagatgtctaaggagggcccactcctggtcaagccaacgctaacttcagggtgtgatggtg

SEQ ID NO: 10897 - DNA, 201 bp, Homo sapiens
gaggttgaggcatagggcttggcctctatgccttccccaggagtgagctcctggctgatgcttctcagaagcccagacaccttctccaccctgtccctgtkagcaggtattcccgacacatggggggagactgagctaaaccccaggtggggtgattcctcagggcgggatctccatgtacctgggggtagattgcccaat

SEQ ID NO: 10898 - DNA, 201 bp, Homo sapiens; identical to SEQ ID NO: 4232

SEQ ID NO: 10899 - DNA, 201 bp, Homo sapiens
agcctgggcagcaaggtaagaaccctgggggtttccacctagaccaagtccagtcaagtgctgctgttgctgctgttttttgctgggtgagggggcctaaytggagagcatgcgtcagtcagtcacccatctgctattaagacctacttatccaccccagggtctgaggaagggaccctggcaatgctcctccaggcttag

SEQ ID NO: 10900 - DNA, 201 bp, Homo sapiens
ggtcctcactttgttcagagaaaatgtcacctcccttgagtggcccttccaggtcatcctgtttctgatcagcctcagatactctctaccgccttacagtkccttcttgttctccacagtaattatctgtaaatgaaagcacagtgcatttttgtttgcttagttctttcttatgtcttctcaactagaaaagaaactcca

SEQ ID NO: 10901 - DNA, 201 bp, Homo sapiens
actctaatcctgcccttcattgtgcctgggaacaaggaaaatgagagataccacagcagataagaatgaatttgatgagaaggggaaactccatcatcagsctccaagtggagcagatgcatcctcagggtgagatgcctcttgagaagggggccacggccaaacttccgggcaacagaaatggttgattgtgttggtcat

SEQ ID NO: 10902 - DNA, 201 bp, Homo sapiens
gaatttccatatccctgcctcaaagcctgttggggtggggagggggagaggtcatttgaaattcaaatgaggatgattaaggttttcttgaggagggaagygtggacaaaaggggttaagcctgctggcaaatgtcggctccagggctccaggttatcaaagggaggtgtgtacttgactggctcccttcccaccccatct

SEQ ID NO: 10903 - DNA, 201 bp, Homo sapiens
cttccccgctctggaaggtggctgtcaccaaaagcctgggcactggtaacttccacatccatcatctcgtagagcctcacagcaacctgggacctggggcsggagactggaggggcaagcaggaagcagttgtgtgcacctggaaactctgctaataataaactgcaccccgtctaaatcccacaatgctgtgaggatgcc

SEQ ID NO: 10904 - DNA, 201 bp, Homo sapiens; identical to SEQ ID NO: 4236

SEQ ID NO: 10905 - DNA, 201 bp, Homo sapiens; identical to SEQ ID NO: 4237

SEQ ID NO: 10906 - DNA, 201 bp, Homo sapiens; identical to SEQ ID NO: 4238

SEQ ID NO: 10907 - DNA, 201 bp, Homo sapiens; identical to SEQ ID NO: 4239

SEQ ID NO: 10908 - DNA, 201 bp, Homo sapiens; identical to SEQ ID NO: 4240

SEQ ID NO: 10909 - DNA, 201 bp, Homo sapiens; identical to SEQ ID NO: 1050

SEQ ID NO: 10910 - DNA, 201 bp, Homo sapiens
ctgggcatggtggcgggtgcctgtaatcccagctactcgggagattgagacaaaagaatcgcttgaacccaggaggcagaggttgcagtgaaccgtgatcrtgccattgcactccagcctgggtgacagagcgagactccatctcaaaccaacaacaacaacaacaacaacacatgtcttgggtgtgacagcagggaggga

SEQ ID NO: 10911 - DNA, 201 bp, Homo sapiens
cactgacccttcttgccctgacatctatttagggccctttgtttttctcactgggagatttaaagaatgggctatagggtcccagaacacagtgtatctcygtatccagttgaggtaaagggagcaaagtcaggggattgtatgtaagttctctattttctatgcagtacattttgtatttttcaaattataaatgtaata

SEQ ID NO: 10912 - DNA, 201 bp, Homo sapiens
tttgcaggaggactcagtgaggggtggtggccgggaggcaacccaggagatcaagcgtgtaagccaagggacctcacatttggcagcagggactagcatayaggatggggcttctcaaccttggcactatagacatcctgggccaggtcattcttgttaccagggactggcctatgcattgcaggatgttttgagcatccc

SEQ ID NO: 10913 - DNA, 201 bp, Homo sapiens
gcaacccaggctggtcaggaaagcctgacagcaggaatggggtttgcaggaggactcagtgaggggtggtggccgggaggcaacccaggagatcaagcgtrtaagccaagggacctcacatttggcagcagggactagcatacaggatggggcttctcaaccttggcactatagacatcctgggccaggtcattcttgtta

SEQ ID NO: 10914 - DNA, 201 bp, Homo sapiens
agggtctcactgggagggggagaccacaggcacgacacagggtctttccctgggtagttcttgaggaggttttcagcagacagggacttactgcaacccakgctggtcaggaaagcctgacagcaggaatggggtttgcaggaggactcagtgaggggtggtggccgggaggcaacccaggagatcaagcgtgtaagccaa

SEQ ID NO: 10915 - DNA, 201 bp, Homo sapiens
gagacttggaaaggagccgagcatgggtgagcactcaaagattcaggctggctgtgtgatcgatgctaggaccatgcaggatgtgggcaaacaagaggagraggctgcctctcatgttcctccccctcggtccccacgcttagggagatgtggggctggcgatgggaaagctgtatggcaacgacttcagccagaccacca

SEQ ID NO: 10916 - DNA, 201 bp, Homo sapiens
aagaggtggatttagccctttgagctagctggccacagtgcctggacccctaggcccagattccactctatccttgtggaatgatagatgtccttaagatyggattcattcctgaccccaaataggcacagcatggttctaggtttaagggtacgttttcctatgaaaataagctcaagaaataatatttggctgggcacg

SEQ ID NO: 10917 - DNA, 201 bp, Homo sapiens
agtgcagtttgccagtggattggagatgaaaggaggagggagaaggtctagcagagagccccataagtctttgtcaaatgaaagaacaaatgatttaatgraaaggaaggttcaaagaggactggggctttgtcctgagggtctggtctatgccacactctcctcacacaccctctccctgcaaactaagaccaaattcat

SEQ ID NO: 10918 - DNA, 201 bp, Homo sapiens
ttaccaagtgtcactggtggggccacagttagaatccagagattccagctcccaggccagcctccttcatgctccaggcactgaactccaaccctgcacargccccagcattgctcctctgagagccaggctcagctcacttctcaggcataccaagatggccacgaaccctacctaggtgctctcaagccccaagaggga

SEQ ID NO: 10919 - DNA, 201 bp, Homo sapiens
aaagcggtctcctcctcccacagactgggccgggactggcatcccaggtaaacaaccccattcttcctgtttcctctaggaatgtctcagctctcactgastttaactcactggtttccccctacccctttaacagggcactaacccctctggggagaggggatagcagggaactatccattggcacaggggaaatccaag

SEQ ID NO: 10920 - DNA, 201 bp, Homo sapiens
ccagaagttcgagaccagcctggccaacatggtaaaactctgtctccactaaaaatacaaaaatttgccgggtgtggtggtgcatgcctgtaatcccagcyactcaggaggttgaggcaagaaaatcaccggaacctgggaggcagaggttgcagtgagccaagattgcaccactgtcctccagcctgggcgacagagcaa

SEQ ID NO: 10921 - DNA, 201 bp, Homo sapiens
atgcctctggtgacctactgggaagttccagaaccgtttagctgagacccatactcttggtcatcacagtgtgctgcctgtcccactcccatctccatcarctagggtcaaaagtgatggagggttggccaggctcggtggctcacgcctgtaatcccagcactttgggaggccgaggtggacggatcacttgaggccaga

SEQ ID NO: 10922 - DNA, 201 bp, Homo sapiens
cttgcttcctggaagcctggctgtgattctatttggagagagcagcagtgccacccacaggttgtagaaagggtgttcaggttttctttggcagggaagtwactcgcagagaacttctccctggccaagagcaaatagattgaactattaataaatagctaacatttcttgagcatgatgtgccaggagctcttctgagta

SEQ ID NO: 10923 - DNA, 201 bp, Homo sapiens
tggcgtctccattgcagaggactccccgatcccccaagcatcggaattattagtcctatgtcctgggctggtaggagaaatcctggactttttgtttaacyaaattggttttattaagaatgaatagtttgctccaccccccaactcccaccccaacaccctccaggaaagattctggcccaggaaacagccgaggcatgg

SEQ ID NO: 10924 - DNA, 201 bp, Homo sapiens
gggcatggagcaaagaagtggggctcttggagacaactcccaggcagccatgttttttgagttttctgaatgtctgactctctacccccacagtgctattycccatctctcccgcttccttctctttgcttccagagttccataatagtctccttaagtgagaggaatgatttccaaagactgtccctgaaacagccatct

SEQ ID NO: 10925 - DNA, 201 bp, Homo sapiens
ctagtttttaaaaacttgctaacacatgttttcctggaatctaaggatgtggaaactctaattttggggagaagaactaggacaccagagtttcttagagrtgccaagtgtggatgggcacagctgaaggggcatggagcaaagaagtggggctcttggagacaactcccaggcagccatgttttttgagttttctgaatg

SEQ ID NO: 10926 - DNA, 201 bp, Homo sapiens
agcctctgtgagatggaagggtgaacacttgtcctcacacctcctggctatgagggtaaagccaaggagggatgcagaaagggcttccacctccttggaasgggctctctccttccagaatgaggctactgctttctgaagtaagtgatgtcagagagttcactgggatcagaaaagataatcatccctgatacattttta

SEQ ID NO: 10927 - DNA, 201 bp, Homo sapiens
aaaaatgcagccggtatctcttggggtactttcagccctgttcacttgagaggagttacccgtctgccccattccaccacttagaatatatttttaaaatrttttcatttgccaatcctttatatatcagttacaaaacagaaactcttcctcactgctagggagaagtgtagaaagggggagaaagaaaaaaaaatcttg

SEQ ID NO: 10928 - DNA, 201 bp, Homo sapiens
aacagctaagagccatggagatgggagaatcccccaagcaaaaatgcagccggtatctcttggggtactttcagccctgttcacttgagaggagttacccrtctgccccattccaccacttagaatatatttttaaaatgttttcatttgccaatcctttatatatcagttacaaaacagaaactcttcctcactgctagg

SEQ ID NO: 10929 - DNA, 201 bp, Homo sapiens
cagtagcaaccccacatggtcccagcctcctaggagccatatgtctcctctcttccatccctccttttgtagaagtttgatgctctcagggtgataatccyagtttgtgtggccaaaggcacacctaggctgctatatagtaggtttgattagagtccaggggctggatgaggtcatctccccaagcacttcctagaggca

SEQ ID NO: 10930 - DNA, 201 bp, Homo sapiens
atgattcaagtcctgggcaccatgaagcattagtgagggtgggtctgccatgagggcacagcgccctcccaacatttttagaactgaattcaggggatttrtattccagagggagaagaaaacttttatgggcttaaaatgaaggggtttttcatgcatgtgtcagcactagcaatgctatgtcctaagaactgaagccaa

SEQ ID NO: 10931 - DNA, 201 bp, Homo sapiens
taaaatgaaccaggtgatgtctatatttccttccagttctgatggcgaaggaaggcaatcaacacattttggaatatctgtcatacacctagtgcaacctrcaccaaacaactttgaagagtctataattctataattccatcacacacacagagagtgaggattgtacagaaatatggagtcagaccaacttagactgaa

SEQ ID NO: 10932 - DNA, 201 bp, Homo sapiens
ctcagtaggggaacagcaggattagggctacaactgagttattacaatagccagagtaggcaacaatttcagagtgataaaaacagatgacagagacacgyggcagtgcagtagaatgaactggacactggatagggagttagcagatccgtgctaatcagccctggcttggtctttaggactaacttgactgtagctcta

SEQ ID NO: 10933 - DNA, 201 bp, Homo sapiens
gtttccatatcaaacagatgtgtgtttatctgattctgaaccttgccctgcatagtcattgagaactctgagtggggttcagagttctttcttttgactgygactaaatctcagtaggggaacagcaggattagggctacaactgagttattacaatagccagagtaggcaacaatttcagagtgataaaaacagatgaca

SEQ ID NO: 10934 - DNA, 201 bp, Homo sapiens
atgtgcacttccttttattggattcatctggaaccccatagtaaaatacacactaggacagagatttcatgacattcctgagccacctttttcctctcttyacctcttctcctcctaatgggggaggtaagagcaaatatcccaccttgtagttactttgtatatgtgagactcaaggaaatacaggatgctggctccaaa

SEQ ID NO: 10935 - DNA, 201 bp, Homo sapiens
gtaactatttgggccacaaatatgtgtaaagtcccagactacacttgtaagtgtagcctggaaatgtttaccccaactgtgcaccatacataaaagcaatrtagtacacagaagaggctggagtgaacaagcacctctcagtagcttccagaagcccagaattctgagtgggaggcccagtgcaggtgcctcacagcatgg

SEQ ID NO: 10936 - DNA, 201 bp, Homo sapiens
ccatttgcttcatttatccaatgcccttcagaggcaagcttccaaatcacaggtttactcaggaaatgccaaagagattcccattcagacctgttgaaaayttcactctcagtaactatttgggccacaaatatgtgtaaagtcccagactacacttgtaagtgtagcctggaaatgtttaccccaactgtgcaccataca

SEQ ID NO: 10937 - DNA, 201 bp, Homo sapiens
ctaaaagctctccagtctgcgctgtttgggccttaggctcatcttcttgagttcttacttaggcaattgcggtaaatagctttttaaccggctaccctcgmtacagtcatgctctcttcaaatccatattccacagggctgttaggataactgaactaaaactaaaatctcactgcaatcgctcccctttactttagttcc

SEQ ID NO: 10938 - DNA, 201 bp, Homo sapiens
acagacaattcctgaaataaacagccctttgttaaaaaagagaaacctttaggggtggaaatacattttatattctaaaagctctccagtctgcgctgttygggccttaggctcatcttcttgagttcttacttaggcaattgcggtaaatagctttttaaccggctaccctcgctacagtcatgctctcttcaaatccat

SEQ ID NO: 10939 - DNA, 201 bp, Homo sapiens
ctgtggagataaatttgtgttgagcctttagccccggggtgagtgtgaaactcacagacttttagggctaatgggtccttgaggccgtctgtcccctgttytcagcagcatcccacagagccccgctgctctgacacaaggctgtcttcctccttttaatcctgtgtgttgacacgtttgtttattcataatataatgtct

SEQ ID NO: 10940 - DNA, 201 bp, Homo sapiens
gcctagcctctagggacccggagtgtgtgcaggactctgaccaacccagtttgaggtttgtagttaggtcagctaattatcccaagccagaacagggctcytactaaacgccccttaggaagtaacgtggccatcctggggctgcctctcctggccatttgaatggaaacagtgtggttggggacatccagtgacacatga

SEQ ID NO: 10941 - DNA, 201 bp, Homo sapiens
tcagtgttggcttggtggttgttgggtgctagggcctagcctctagggacccggagtgtgtgcaggactctgaccaacccagtttgaggtttgtagttagrtcagctaattatcccaagccagaacagggctcctactaaacgccccttaggaagtaacgtggccatcctggggctgcctctcctggccatttgaatggaa

SEQ ID NO: 10942 - DNA, 201 bp, Homo sapiens
tttgctccctgttgtcttttcttgcatccagtgatccacaaaacctgcccccttttcccaggaaggtgaacttgttggctttatgcaaatagagtgtggartgggctccatccagtcagctctggtaaatattgcctaaccctaccacttgccggctgggcccgggagctatttacagaggcatctcagtgttggcttggt

SEQ ID NO: 10943 - DNA, 201 bp, Homo sapiens
aagatagcaccactgcactccagcctgggtgacagagactcggtctcaaaaaagaaacaaacaaaaaaaagagaaatattagactgaatattttcagagawcaaagaatgaatttttatggtcagttagagccaaatatcatctataggctttgcttaaagcaagttatacattaagatttttatgtttatattttccccc

SEQ ID NO: 10944 - DNA, 201 bp, Homo sapiens
gagcccctcacttgacatgtgtccagtacttttccatgtttccaaagccctgtcagtcataccaacacccgcagacctcttctggctgaggcttgccagcwgagatggtagagatagtatctgcaggctcagggagggttgccaggtaaagggtggggtggagaagtgttcccacccaaagagggttcccctggcccttcg

SEQ ID NO: 10945 - DNA, 201 bp, Homo sapiens
cctttttcaagcaggcgtctctttggagcaaggcttttgaaagggaagctggatttagccccaaacaataacaggggaagttaatactatttattgaaccytcagtttataacaggcagtgggttgagtgctttgcaagcagtatctcatttaaacctatagccacccagagcagtagattttatatttccattttaaaga

SEQ ID NO: 10946 - DNA, 201 bp, Homo sapiens
ctgggtggaccaagccctgtggcaagccccataatgaacagcacagaggaacaggaacagctgtctgagttctccagaagcctgtgcctagtacttgctgrtctaccagacagccccaaacaccaccaaaaagcccctctgcagcatggggtttgggcctagctgattccggctccagcactggcatgagctctgcatgca

SEQ ID NO: 10947 - DNA, 201 bp, Homo sapiens
ttcctgtttgtagcctgggcagcagccccagtactgggtggaccaagccctgtggcaagccccataatgaacagcacagaggaacaggaacagctgtctgrgttctccagaagcctgtgcctagtacttgctgatctaccagacagccccaaacaccaccaaaaagcccctctgcagcatggggtttgggcctagctgatt

SEQ ID NO: 10948 - DNA, 201 bp, Homo sapiens
agaggtgggaatttgtcctcttttgccagccatgcttggtgctttggcctgaggctcaggtgtcaactgtttcctgtttgtagcctgggcagcagccccartactgggtggaccaagccctgtggcaagccccataatgaacagcacagaggaacaggaacagctgtctgagttctccagaagcctgtgcctagtacttgc

SEQ ID NO: 10949 - DNA, 201 bp, Homo sapiens
ctgtattggtcaactcctctgcgcctctgattcctcatgtgaagatgagaacagtaagagtatctatttcctagggatggcgtaagaatgaatagagttamgatctataaagtacttcgaataatgtctggtatacaataacgcaccaataaacattagctcttattattttctgatgaataagaacccatcattttctcc

SEQ ID NO: 10950 - DNA, 201 bp, Homo sapiens
tcccttctccaaagtgatgtccccattgtagtcaagatactataataattatagcatttcttgaactctgactgtatgccgggcattgagtataaaagggyttagcaaccctgtgaagtagttgtcatcattcctattccatagatgggaaaactgaggcactgagaggttagggaattttcccatcataacactgttcac

SEQ ID NO: 10951 - DNA, 201 bp, Homo sapiens
acagatgtccggtggggcacttggaagtcatataaaaagttgtatgggatgcaaagaagtgtttatttgatactgtcttctacagcgcaagatgtctagartacctgccctcagcccaataaatgcaaaccacgcctcctaattattaagacagccagagaaaccacgccacagatttcagaaaacatctcccggggtagc

SEQ ID NO: 10952 - DNA, 201 bp, Homo sapiens
gtaaagctccagccaaatctaatacttcctcaattaacacagaaaatggcatccctgggtaaaatgcatattaagagtgtgtaaaagatactttgtgttcrcataaaaaatagagttgggttttgggcttatatgattatagtcaggctgttcaccgacacagatgtccggtggggcacttggaagtcatataaaaagttg

SEQ ID NO: 10953 - DNA, 201 bp, Homo sapiens
aaaggtttaatgagacagtaggtccctcatgcctctatgagtgtgacagacacaagtacaggctgatattggtatgctatcctggctgctcaaaagccacratctttcaaagtgttaaacaactctttgtaaagctccagccaaatctaatacttcctcaattaacacagaaaatggcatccctgggtaaaatgcatatta

SEQ ID NO: 10954 - DNA, 201 bp, Homo sapiens
ggcagcagcgagactccgttacaaaaaagaaaaaacagatatacaaataaaaatcagtaatattgtctaatttgaataaaaaggaaaaagcaaagtaattwataaaacaatgtgtatttcagcaggtatatccttagacatattcccctaaaaggtttaatgagacagtaggtccctcatgcctctatgagtgtgacagac

SEQ ID NO: 10955 - DNA, 201 bp, Homo sapiens
gttctccaatctccatgtgcctcaatcttcccatctataaagtggggagaatagtgatatctgtctcacggggttattgtgagggtcaaatgatatgtagstaactcttagacaagtatcttgaacatatacactgtatatgtgctattattattactatttcagtaggcatggagagacccagctttaagagataattct

SEQ ID NO: 10956 - DNA, 201 bp, Homo sapiens
cagcctcatttatgttttactagaggtatggaaaaagtgtaaaatcaaatagaaataggaacactgaattcttcccaggagctcagagcagacatcatggrtgaggtgatatctgagtctgtctctgaaggatgagtaggaagttttagtcagagaagagtgacgtagaaagggagatggcaagaaggaaggaaaagggct

SEQ ID NO: 10957 - DNA, 201 bp, Homo sapiens
catagaagcatgcggtggagtgagctctccagttggcatggccagctgtcctccccacagactctgatttgctatgtgacctcagacgattcagcctcccytccaaggtgaccctttacccagctatcaccaccctggaggagactttccaaaggcgtttccaggaaacaggtcgaggaggaggatcccaaccacaagcga

SEQ ID NO: 10958 - DNA, 201 bp, Homo sapiens
gtaaccattaaaaatgatacttataagcatagaagcatttatgatgttccttaatagcataggagaaatatttatgatgctcactggaaaaagtgggataraagtctatacagagtggtatatatccatgaagagaaacaattataaataatatcataaaatatacaaaaatattaattatgacgtcctctcggtagggtg

SEQ ID NO: 10959 - DNA, 201 bp, Homo sapiens
acaacatcacaatgtcacaaagggattttttttaagagaaaagcaattttaccttcatctacccctttcaacacagctattgcggctgtgggtccttcccrtctttagctcccttagcagatctcttttttttttttttagacagagtttcactctgtcacccaggctggagtgcagtcatgcgatctcggctcactgcaa

SEQ ID NO: 10960 - DNA, 201 bp, Homo sapiens
tactctctaccgccttacagttccttcttgttctccacagtaattatctgtaaatgaaagcacagtgcatttttgtttgcttagttctttcttatgtcttytcaactagaaaagaaactccatgaggccagtgacttccttcttctccaatattgtatccccagtgcctggaacagcaccttgcacatagactgtgcttag

SEQ ID NO: 10961 - DNA, 201 bp, Homo sapiens
gaggccatgtctcccaagagctgtcttacctgagtgccaaaggctgagccatgtgccactctctgccctcctgcagcgtaggggccagtctcccgggaggscatggctggcccctgcactctaatcctgcccttcattgtgcctgggaacaaggaaaatgagagataccacagcagataagaatgaatttgatgagaaggg

SEQ ID NO: 10962 - DNA, 201 bp, Homo sapiens
cctagacacatgggctcggagacatgagggaggccatgtctcccaagagctgtcttacctgagtgccaaaggctgagccatgtgccactctctgccctcckgcagcgtaggggccagtctcccgggaggccatggctggcccctgcactctaatcctgcccttcattgtgcctgggaacaaggaaaatgagagataccaca

SEQ ID NO: 10963 - DNA, 201 bp, Homo sapiens
ccttgttttaccactgagatatcaggaggtccctgctttgaccaagttcacatagcttggtggtgatggagctcaggctcgaacctcagtcctctgacttmcagtccaggactctttctaagcataccctgctgctcctccacacagcatcttacaggagtagaaaagtttctggtgatcgtggaccagtttttaacacaa

SEQ ID NO: 10964 - DNA, 201 bp, Homo sapiens
tttatcttgttggtttgggtctcctgttagagcctaccaaatattttctaatcctgattctgtggtctacttttatgtattgctttctgctctctgcttcraatcacttccagatttgatccgcatctatcttctttattagcctaagctgttgattaaggtctaaaaccatactcaatttttttctgcgtcactcaatgc

SEQ ID NO: 10965 - DNA, 201 bp, Homo sapiens
ttctggacatttttaaacaaacacaaaatgagagactaatacaatgagcccccatgcactcatcaccccttctcagcaaccatcaaattcttgccattctyattactggaatattttcttttaaattacaggcattataacatttcagtcctaaataagggaatatgcatctctaaaacatgaagacattttccttcttaa

SEQ ID NO: 10966 - DNA, 201 bp, Homo sapiens
ttttctgaagtattttatttatacatttattttcaatatctttttattctggacatttttaaacaaacacaaaatgagagactaatacaatgagcccccawgcactcatcaccccttctcagcaaccatcaaattcttgccattcttattactggaatattttcttttaaattacaggcattataacatttcagtcctaaa

SEQ ID NO: 10967 - DNA, 201 bp, Homo sapiens
attcccttttatctcaaaaacctgagcaagactttaaactcagttcagctagagagtgatagatatagtccccacactgacacccttccctagagaaaaaycagcccaggagccatgatccagagaggctggattgcccttttctggaagcaggctggctggagccaattctgtttacctggggcccattgcccaggtgtg

SEQ ID NO: 10968 - DNA, 201 bp, Homo sapiens
tggttcaaagttgcctctcttcttccccctgctgaccccaagaggagacttaggggcctcccacataggtggtggcagctgtctgttaagggtaaatgttyaatttattgaaatgaagcagggcagagaggctggaccagcaggacttgggggctgagccaggggcctggtgtaggtattctctttctgtggggcactgac

SEQ ID NO: 10969 - DNA, 201 bp, Homo sapiens
attcaccgttttaaagtgtgcagttcagtggtttttagtatattcacaaggttgtgcaaccatcagcgttatctaattccaggatgtttttattactcctmcctgcaaaagcccctgtacctgctagcagtcactccccattcccatcttacgccatcacattattagctttaggattgacttctttcttccttccagatc

SEQ ID NO: 10970 - DNA, 201 bp, Homo sapiens
agactggactttatccctagggagtggagattttaaaaagaagcttcagtcagtgagccatcctggcaaggagctgatgtcaacaaagtcaaaatttccayccttactttgagggtggaaatttccaaacactcatgtcagaaagagccaggtcctttgctgggcttcatgggaacccagttctcaggaggttctgatgtg

SEQ ID NO: 10971 - DNA, 201 bp, Homo sapiens
gggccccctctctgtccctcctgtccacagtaccatgcctggaacaggtgagctttaaaatgagatttctgaagaacaccagaattcttttaaaaaatggratattagaactgaaaggtatctacctaagtcaggcttccctaaatgcatttcaaaggatattaaaatctgtgttgggaaaaaagggttctgtgatcaaat

SEQ ID NO: 10972 - DNA, 201 bp, Homo sapiens
atccaggcggttcagcaaggcagccagttcttattggccaattgttgcatagcccgaaacgttggcgctcctcacctacccctactgagagagagaaagargaccatataatatacattaccagctttaaaaaattgtttcgaggtataattcatataccataaaattcaccgttttaaagtgtgcagttcagtggttttt

SEQ ID NO: 10973 - DNA, 201 bp, Homo sapiens
atgctggtctcttcttggtcccttggtccctggagggatgtagcagctgccatctgagggggaagcccgggcatagaagcatgcggtggagtgagctctcmagttggcatggccagctgtcctccccacagactctgatttgctatgtgacctcagacgattcagcctcccttccaaggtgaccctttacccagctatcac

SEQ ID NO: 10974 - DNA, 201 bp, Homo sapiens
aaacggaccagcatcgagaccaacatccgcctgactctggagaagaggtttcaagatgtgagcagcaccttcgggtgggcacgggtgggctacctcacacrggtagggagagcagacacggcccaggccccttggcaccagcccctccgcacctcacacctgctctgggacacgatcagaaaacacattatcccactccag

SEQ ID NO: 10975 - DNA, 201 bp, Homo sapiens
gtaaaaaaaaaaaaaaaaaaaaaaaaaaaaaatcagaaaatgttatttattgatcttcgtggtggatctgcttggcgtgtttcctatcaggcatttgggcrccctgggctgccaggatcctctttagaaccccacctggaagcatcccagcatctcccagtgcccaagcatctacccagctctggaggggccgatgagccc

SEQ ID NO: 10976 - DNA, 201 bp, Homo sapiens
ggtttccccctacccctttaacagggcactaacccctctggggagaggggatagcagggaactatccattggcacaggggaaatccaagctacagcaagtrgggggacaatttaccaagtgtcactggtggggccacagttagaatccagagattccagctcccaggccagcctccttcatgctccaggcactgaactcca

SEQ ID NO: 10977 - DNA, 201 bp, Homo sapiens
cggccacttacagtctgtatcccagttcctgctatctcagacccagcctgggcagcaaggtaagaaccctgggggtttccacctagaccaagtccagtcargtgctgctgttgctgctgttttttgctgggtgagggggcctaattggagagcatgcgtcagtcagtcacccatctgctattaagacctacttatccaccc

SEQ ID NO: 10978 - DNA, 201 bp, Homo sapiens
ttgctagacactggggatacacagtggcataaaccaaggtcagcctgcaaagtctctgagtctggagacccctgggacggacgagtggcaggcagatgggrctgatgtccccagcttgtaaattctgtggtgtatgtgtatctctccgtgtgtaggacatggcttccctccatccgctccagcagcttgtgctggttcccg

SEQ ID NO: 10979 - DNA, 201 bp, Homo sapiens
caggtaaacaaccccattcttcctgtttcctctaggaatgtctcagctctcactgagtttaactcactggtttccccctacccctttaacagggcactaamccctctggggagaggggatagcagggaactatccattggcacaggggaaatccaagctacagcaagtggggggacaatttaccaagtgtcactggtgggg

SEQ ID NO: 10980 - DNA, 201 bp, Homo sapiens
agctgcagcccagtaggccctgggctagctctctcctctctaggctggtcactcctttcctgcctggatcttcctgccatttccatctctgactgcctgaygggatccagcactgacgctctcctcttgcttccacttgcagattaaaaccgaagatctcagtgactccctgcagcagaccctctcccatcggccatgcca

SEQ ID NO: 10981 - DNA, 201 bp, Homo sapiens
ctgttccctgcccctgattcccttctcttggccatactctgtcctttcggtgcctatagaacccaaaacccagctcggaggagatctccatgattgcagarcagttgtccatggagaaggaggtggtgagggtctggttctgcaaccgacgccaaaaggagaagcgaatcaactgccctgtggccacacccatcaaaccac

SEQ ID NO: 10982 - DNA, 201 bp, Homo sapiens
tggtgagggtctggttctgcaaccgacgccaaaaggagaagcgaatcaactgccctgtggccacacccatcaaaccacctgtctacaactcccggctggtragtggccaggaaccaagctgtctgccaagcactggagggacatgatgcttggaggggaaggtggtggctgcagggaagaggggagcatccagtaaataaa

SEQ ID NO: 10983 - DNA, 201 bp, Homo sapiens
cgtgcttatagtctcagccactcaggaggctgaggagaatcgcttgaacccaggaggtggaggttgcagtgagccgagattgcaccactgcactccagccyggcaacagagcaagactctgtctaaaaaaaaaaaaaaaaaaaaaaaaaaaagaacacggaacttaaactctctaagcctcattttccccatctataaaat

SEQ ID NO: 10984 - DNA, 201 bp, Homo sapiens
tgaaactgtagtcccccccagacatggagggggtcctgatattcctgctatgaattcctgagaggacatcttgtccatgcctctctcttcttttggagacrtttcaaacccatccctggaaaatgagagaagctgctttcttagagacttattttttgtctattttatatctctaagaaaaaccaaccccacgttttctct

SEQ ID NO: 10985 - DNA, 201 bp, Homo sapiens
tgcacttaccatgcgtactcaacagcaccaaatggctcacacccaattcagctggagggcccactgatggagtgcttggatgtgctattaacatttttaatttttttttttttttgagatggagtctcactctgtcacccaggctggagtgcagtggcacagtcttggctcactgcaacctccacctcccgggttcaagcg

SEQ ID NO: 10986 - DNA, 201 bp, Homo sapiens
agggcgatgaacacctgaatgtggaaaagtgctgaaaaagtggaggaagaatttagaaagaaatgagcgttcaaattagacaagtcttagggccttgaagrgcagccagaacccaggcaactgacatgcagctacagtctgtcccaacccagcccccaagcacccgcatagacaagcagacatacacttcagaccccagag

SEQ ID NO: 10987 - DNA, 201 bp, Homo sapiens
gattctggactcatctttatcacaaacctgcgaactcacctgagttaccgtccctctttcggctggagtttgtgcataagacgaagggtctgaatctgagrgtctctaaaacaacttccagctctgagatgctggggtctgtgaacacactccaatccttttcacacatcagttagtatttgtaaggctgtttgagcagtg

SEQ ID NO: 10988 - DNA, 201 bp, Homo sapiens
ggtctggaatcagtgtttaaagaactccatgggctgtcatgaacatagtcaagtctgggcattggagctcagagattttgtccctgagttgccatttgctsgtcgcatgacttttagcacatggcttgtcctttctgggactcagtttccttacctgtaaatggtgggtccagagcaaggagtctctggttcctctctagc

SEQ ID NO: 10989 - DNA, 201 bp, Homo sapiens
gtctggaatcagtgtttaaagaactccatgggctgtcatgaacatagtcaagtctgggcattggagctcagagattttgtccctgagttgccatttgctgktcgcatgacttttagcacatggcttgtcctttctgggactcagtttccttacctgtaaatggtgggtccagagcaaggagtctctggttcctctctagca

SEQ ID NO: 10990 - DNA, 201 bp, Homo sapiens
atgacagagtgagacattgtctcaaaaaaacagaaaagattccaagaatggagtcttgccagagtgggaagaaaacagtgctttggggttggagacatggtttttttttttgttgttttgtgtgtgtgtgtgtgtgtgtgtgtgtgtgtgtgttttgtttgtttgtttgtttgcctccccctgaggatcattccccacata

SEQ ID NO: 10991 - DNA, 201 bp, Homo sapiens
gacatacagaaaaaggaaaagaaacttcaatgaacagccacatatccatcatctggattcaataatgaacatttcgccatatttgcttcatctatttttcygaagtattttatttatacatttattttcaatatctttttattctggacatttttaaacaaacacaaaatgagagactaatacaatgagcccccatgcact

SEQ ID NO: 10992 - DNA, 201 bp, Homo sapiens
taataaaacttttggttggcttttttatatttttctatcgtggtaaaaaatgcataacataaaatttactgtcttaaccatttcttttcttatttatttaatttatttatttatttatttatttatttattattattatttattttgagatggagtctcactctgttgcccaggctgcagggcagtggcacaatcttggtt

SEQ ID NO: 10993 - DNA, 201 bp, Homo sapiens
aataaaacttttggttggcttttttatatttttctatcgtggtaaaaaatgcataacataaaatttactgtcttaaccatttcttttcttatttatttaatttatttatttatttatttatttatttattattattatttattttgagatggagtctcactctgttgcccaggctgcagggcagtggcacaatcttggttc

SEQ ID NO: 10994 - DNA, 201 bp, Homo sapiens
ataaaacttttggttggcttttttatatttttctatcgtggtaaaaaatgcataacataaaatttactgtcttaaccatttcttttcttatttatttaatttatttatttatttatttatttatttattattattatttattttgagatggagtctcactctgttgcccaggctgcagggcagtggcacaatcttggttca

SEQ ID NO: 10995 - DNA, 201 bp, Homo sapiens
taaaacttttggttggcttttttatatttttctatcgtggtaaaaaatgcataacataaaatttactgtcttaaccatttcttttcttatttatttaattwatttatttatttatttatttatttattattattatttattttgagatggagtctcactctgttgcccaggctgcagggcagtggcacaatcttggttcac

SEQ ID NO: 10996 - DNA, 201 bp, Homo sapiens
tttttctatcgtggtaaaaaatgcataacataaaatttactgtcttaaccatttcttttcttatttatttaatttatttatttatttatttatttatttattattattatttattttgagatggagtctcactctgttgcccaggctgcagggcagtggcacaatcttggttcactgcaaactctgcctcctaggttcaag

SEQ ID NO: 10997 - DNA, 201 bp, Homo sapiens
cttgagccactgcacccagctcccctagcagatctgatatatcatcatagctgatctcaaaaccaggctttgctcagagatcattttgcatctcacctctycctctttctcgggaccccacctgctcttcatcctctgctgccaccttgccagcccacctgctctcagagatgcgtcatgacctcatgaccacacaggaaa

SEQ ID NO: 10998 - DNA, 201 bp, Homo sapiens
cacctgctctcagagatgcgtcatgacctcatgaccacacaggaaagggctgtacttgcccatggttgtttaggacacagctgaggaaaaggggttaaagctccagggaattctcttagaccccattcattcatctctcaggtgtttcttgagcctcttatccatgttaggaactgtggtcattttgtggccactgaggac

SEQ ID NO: 10999 - DNA, 201 bp, Homo sapiens
acctgctctcagagatgcgtcatgacctcatgaccacacaggaaagggctgtacttgcccatggttgtttaggacacagctgaggaaaaggggttaaagctccagggaattctcttagaccccattcattcatctctcaggtgtttcttgagcctcttatccatgttaggaactgtggtcattttgtggccactgaggaca

SEQ ID NO: 11000 - DNA, 201 bp, Homo sapiens
cctgctctcagagatgcgtcatgacctcatgaccacacaggaaagggctgtacttgcccatggttgtttaggacacagctgaggaaaaggggttaaagctccagggaattctcttagaccccattcattcatctctcaggtgtttcttgagcctcttatccatgttaggaactgtggtcattttgtggccactgaggacaa

SEQ ID NO: 11001 - DNA, 201 bp, Homo sapiens
ccattcattcatctctcaggtgtttcttgagcctcttatccatgttaggaactgtggtcattttgtggccactgaggacaaaaaaaaaatgggtgtcactstccagctctcaaggaattcatagactagcagaagagggaaacatacaaagagggagtgacacaatgagtgccacgcaaccagcagagaggcctcccggat

SEQ ID NO: 11002 - DNA, 201 bp, Homo sapiens
gcccaaggtggagctcagatgtaagacaggcctgtctgactttctaccataccaggctgcttttgagagaaagaggacagacagagagagagagagaaaaagagagagagagagagagtgtgtgtttgtgtgtgtgcactcctgcaaatgagacatgacctaatgttacccagagcccctcacttgacatgtgtccagtac

SEQ ID NO: 11003 - DNA, 201 bp, Homo sapiens
cccaaggtggagctcagatgtaagacaggcctgtctgactttctaccataccaggctgcttttgagagaaagaggacagacagagagagagagagaaaaagagagagagagagagagtgtgtgtttgtgtgtgtgcactcctgcaaatgagacatgacctaatgttacccagagcccctcacttgacatgtgtccagtact

SEQ ID NO: 11004 - DNA, 201 bp, Homo sapiens
gatgtaagacaggcctgtctgactttctaccataccaggctgcttttgagagaaagaggacagacagagagagagagagaaaaagagagagagagagagagtgtgtgtttgtgtgtgtgcactcctgcaaatgagacatgacctaatgttacccagagcccctcacttgacatgtgtccagtacttttccatgtttccaaa

SEQ ID NO: 11005 - DNA, 201 bp, Homo sapiens
atgtaagacaggcctgtctgactttctaccataccaggctgcttttgagagaaagaggacagacagagagagagagagaaaaagagagagagagagagagtgtgtgtttgtgtgtgtgcactcctgcaaatgagacatgacctaatgttacccagagcccctcacttgacatgtgtccagtacttttccatgtttccaaag

SEQ ID NO: 11006 - DNA, 201 bp, Homo sapiens
cattctcaggttcctgttcatctttccaaactcagttcaaatgcctcattctccaacttaccccctccactacctccacctgtgtgccttaataggcttcktgtgtgtgtgtgtgtgtgtgtgtgtgtgtgtgtgtgtgtgtgtgtgtctgccctgcccaccagtcagtggaatatttgggaaaagggtctgtatcatatt

SEQ ID NO: 11007 - DNA, 201 bp, Homo sapiens
aattgttgtctcaacttgtgcagttaattttcatatttctaagtaaaggatttttatatttgttcctatgttttatcttatgacttgcttcccttcctgcyatatgtttgagcttttttttttgtgaatcttgatgtccgcgcagagtattagctggccctgctcctcatgcagagatgtaataagtatgcatgctacatc

SEQ ID NO: 11008 - DNA, 201 bp, Homo sapiens
agagataaacttgattgtgagaaaggaagaaaaaaaaactgggaaaagcagagctcagagctgaaaaaaaagaaaagaaagaaagaaaacaaacaaaaaamccaaaaaaaaaaaaaaaaaaaaacaagaaaaaagggcagtctggggccatacagtactacagccaacagaggtcaaacacatcagtatccctgagggcat

SEQ ID NO: 11009 - DNA, 201 bp, Homo sapiens
catctataaaatgggtcttgtaacatagcaagcatacttacatgcttataagtctactcctactctctctttatacattataaatttcttttcttttttcttttttttttttgagatggagtctagctctgtcgcccaggctggagtgcagtggcgcaatcttggcttactgcaagctccacctcccgggttcacaccatt

SEQ ID NO: 11010 - DNA, 201 bp, Homo sapiens
tcaccggaacctgggaggcagaggttgcagtgagccaagattgcaccactgtcctccagcctgggcgacagagcaaaactctgtctctgaaaaaaaaaaartaatggaggaagtataaactctctcctgttgcacaaatcccaagtagaggttttggaaatccagaatccaaacaaaatgcaactctgccttccgccctta

SEQ ID NO: 11011 - DNA, 201 bp, Homo sapiens
tacctactagttgccagtagcatccacccccagttgaaacagccaagaatctctccagacattgccaaatgtcccagggggagtggtggtgatgcagagtcccccccggttgagaactgccggcctaggcagagagagggagtgagccagtctccagggctgggctctattcagtcgattcatatggattcgtggttacac

SEQ ID NO: 11012 - DNA, 201 bp, Homo sapiens
gcagtgagcggagatcgcgccactgcactccagcctaggcaacagagcgagactccgtctcaaaaaaaaaaaaaaaaaaaaaaaaaaaaaaaaaaaaaagwaatgacaagggagaaggacatcaggtaataaggaagaacacagaagggagcagcagctctggggactctacctgccccacataactcatccatggacttc

SEQ ID NO: 11013 - DNA, 201 bp, Homo sapiens; identical to SEQ ID NO: 1048

SEQ ID NO: 11014 - DNA, 201 bp, Homo sapiens; identical to SEQ ID NO: 1049

SEQ ID NO: 11015 - DNA, 201 bp, Homo sapiens; identical to SEQ ID NO: 4243

SEQ ID NO: 11016 - DNA, 201 bp, Homo sapiens; identical to SEQ ID NO: 4244

SEQ ID NO: 11017 - DNA, 201 bp, Homo sapiens; identical to SEQ ID NO: 4245

SEQ ID NO: 11018 - DNA, 201 bp, Homo sapiens; identical to SEQ ID NO: 4246

SEQ ID NO: 11019 - DNA, 201 bp, Homo sapiens; identical to SEQ ID NO: 4247

SEQ ID NO: 11020 - DNA, 201 bp, Homo sapiens; identical to SEQ ID NO: 4248

SEQ ID NO: 11021 - DNA, 201 bp, Homo sapiens
tgtatatgtgctattattattactatttcagtaggcatggagagacccagctttaagagataattctgagataagatcaggaagattttggcgacaggttsggcatggacagcaaagaagagggatgagttaaacatggctgagaattctagcttgagatgctgaacattggtggaaccacaacctatcatcaagaagaca

SEQ ID NO: 11022 - DNA, 201 bp, Homo sapiens
cctgcagggaaagccaaaatcctcagccctagcttgaattctcagcagccaccctgcatcctttcccttcttggttttcttcagctctggtaatcagatcycagagtagatcgtcttgaccctccttagcctctacgcctctccagacaggcgggcaggtggaaggactggtttggggactgctgtttacatgtctgttta

SEQ ID NO: 11023 - DNA, 201 bp, Homo sapiens
gtgttggcccatttttaggctgagacccaaaagctcgtcccacccatcagcctcagcctcctacccaacaggaacaggttctcagtgtcttagcatcctaygggactcaagaagaggcttgataggttatctcaccctgcccctccaatcctgaagtggcaccttgttgatcccataatggatacatcaaatgagtagaca

SEQ ID NO: 11024 - DNA, 201 bp, Homo sapiens
cagaggtgtacacctcggccggagccacacacgttagtcctcacacacatgaaaaagtaggttttctcccctctttccctggggcacaggtctaccctttytcctcatcctgatcatctccagacctgggcatccggactgccaactgcctgattacctgatgcaaattaagactgcctgcttgactgggattggctgggg

SEQ ID NO: 11025 - DNA, 201 bp, Homo sapiens
agaagcagagcaggcctgaggcctacccagcctgaaaacaagcgtcagtgagtgcccggagggaggggacctggagtgcccagttccccagatgctgtttmctggcagggctgagtgagaggcagactggcagtgagatgttggcactgagtggctctccaggacgtgccagaaaggctaggtgaggcggaagaagccatc

SEQ ID NO: 11026 - DNA, 201 bp, Homo sapiens
gattggctggggagctgagtacgcaaattggctcaccaagactttatctggtttgaaagagttaaagtgctgccccagagaagggggggtgtgggggtcamcatgatttgaataaatattcttctgtctttaaggcttcagtctttgggtggtttaataaggagaggagcagagagagagtgagttggttcaaagttgcct

SEQ ID NO: 11027 - DNA, 201 bp, Homo sapiens
caggacgtgccagaaaggctaggtgaggcggaagaagccatccaactgggtgtcatccagagtctgaggaaagtctgtttctagactgggcatacctgggrcagatccccgggtaggtgctctccccttcactgcccgcagagaaggccagggtttgaatgggagcaagtctcttcagaaaggtgggcttagcagtggatg

SEQ ID NO: 11028 - DNA, 201 bp, Homo sapiens
atctcactgcaatcgctcccctttactttagttccaccatgccctcagagtcccttctgaactcttttgtcttctgccatgggcccctgcctgctcacccrcctgtcctctccctcccctacagcagcagtcccaaattgctggtagatcctgaacaggaagagaaagccccgtttcaccctctgcgactttggacagagc

SEQ ID NO: 11029 - DNA, 201 bp, Homo sapiens
gggccatggatttccaccaggcagatcaggacagtgttttatgtatgctgttgagcattgtgttgcttgaagacctcccaaaagtcctgtgaggccagaakagagtctgaagcaagttggcagctgtccttgtcccacgtttcctgccccaaaagctgagaatcagtggcctggggtttcctctcagccccacacttggca

SEQ ID NO: 11030 - DNA, 201 bp, Homo sapiens
cacaagtgtacagcataacactcaatgctcaggtgagatccaggcgggccagagcacggtgtaactatttgttcatctagccatccatttacctatttgawtgtatttattgagcaggtactatgcctttctcttgccctgatttctacttgtgccagctgcaaataaggcagtaatggggcctgccctcatggaataatg

SEQ ID NO: 11031 - DNA, 201 bp, Homo sapiens
aactacagcattggctgtgagggagacatgccttcacctgtagggagacaggcaaagactgtcactaaagccacacaggtgaagagggccagctgcagagscagacacagaggatggagaggtgtggagacaaatgagatggggagggagactcctccagatcagtggtgcccagattttggggtttcatagatgagattc

SEQ ID NO: 11032 - DNA, 201 bp, Homo sapiens
gtcagggcagattccaggtccttcccatgtgaatatcaccaccctcgtggctcctgctttcgcgccttcacactcagtccttgtctatacgctgatcccayggggatcagtgccctttgcagctgcaaagggaagtacaggaggtaggacattttgactggcagagatgtccagcaacaggacggatagcccaacgggcca

SEQ ID NO: 11033 - DNA, 201 bp, Homo sapiens
aataccaactctgtagtctactagctgcgtttacttctctgaacctcagttttctcatctgtaacgcagggctaataattgtaccttccatctaaagtggyactgactaaaatcagatggtgtatgttcagcatggagcacagttcttggcacgtaggaagcactcaatctatattcattgagtgaatgagtaaatgaatg

SEQ ID NO: 11034 - DNA, 201 bp, Homo sapiens
agataacacagaggagcctggccccaccccacacctctctcactcacccctggcaagtgctgtccgacaggtgaagggttacagtgtctcagggagtttcsgtgttggcccatttttaggctgagacccaaaagctcgtcccacccatcagcctcagcctcctacccaacaggaacaggttctcagtgtcttagcatccta

SEQ ID NO: 11035 - DNA, 201 bp, Homo sapiens
tcaagatgagtggggatgtagccgattccacggatgctcgcagcactctcagccaggtggagccaggtaagggtcttctcttctcggggatggagggggtsgggggaagagagttgttgggaattgttgaacaactggtgtctcttcttgcttggtctttcagccaaccagaccccaaagctaggtcttaggaactaaggg

SEQ ID NO: 11036 - DNA, 201 bp, Homo sapiens
ggggagggggagaggtcatttgaaattcaaatgaggatgattaaggttttcttgaggagggaagtgtggacaaaaggggttaagcctgctggcaaatgtcrgctccagggctccaggttatcaaagggaggtgtgtacttgactggctcccttcccaccccatctccacgggaccctggagagctgggggtggttggagga

SEQ ID NO: 11037 - DNA, 201 bp, Homo sapiens
gaagcaccccctcctcccaggacccagtgctaagagatggtgcagattcacggagactagatgttgtagttccagaagatctaaaagtctttttttcccakagagtttctgcagcaacttcatatgaggtttcatttggagataacatggtgtagtatggacagcctttgctggtagacagatgtgggtttcagtctctac

SEQ ID NO: 11038 - DNA, 201 bp, Homo sapiens
gggaggagaggtggaggcggaggctgcttttgacactgggcacctcctccattaggatccttggactttcctctgcagcacttcattgggtattatggccrtcttggcctaaggagattgtattggaatcctggggctccccagaattttagtgtgccttttactctcttgatcacttaattcaaattctgtggacctaga

SEQ ID NO: 11039 - DNA, 201 bp, Homo sapiens
aactgaggcccaaacggttgactggcctgcaactcagtagcagagccaggacttactccattcccttttctctgtgactgctggatcacaggggctgtgcycactacaggtctgttatctccaaatccagcttgtcccactgatcaccgctgccttcatggcccccataccctccttgacctctgctgcttgtgttcagat

SEQ ID NO: 11040 - DNA, 201 bp, Homo sapiens
actgaggcccaaacggttgactggcctgcaactcagtagcagagccaggacttactccattcccttttctctgtgactgctggatcacaggggctgtgctyactacaggtctgttatctccaaatccagcttgtcccactgatcaccgctgccttcatggcccccataccctccttgacctctgctgcttgtgttcagatc

SEQ ID NO: 11041 - DNA, 201 bp, Homo sapiens
ttgagacctggggatgtatcagagattatttcccttttatacatagggaaactcagatacactggtagagtcccttggctcaagtccactcagccttttgrtaacaaatttggtagctgctccctagccttagagaatttatcttaaactgtcaattgagtaggttcagccaacccttgtgcctagagccctagagccctg

SEQ ID NO: 11042 - DNA, 201 bp, Homo sapiens
tgacacaaaatgtggacaaagagatcaattccaagtagttgctttaaatatatacatacgcacatgtatgtattacatacgcacatgtatgtattacataygtacatgtatgtaatacatacatgtgcatattttcatatatgggtgtatgtctgttcatttagataatgtacctttaaacctctcaagacacctttttca

SEQ ID NO: 11043 - DNA, 201 bp, Homo sapiens
acagaagtctctctatctcatcttccagatccacaaccaacacccagttgcctggaaagcttccaaccttttccccttaacagctgtaaaaagggattttygtaaattcaggaaggctttatttcttaatttcttcatttctgaacccctgagagtgtcaaagatgtctgtcagaggccatgggaattgtcgatgtaccct

SEQ ID NO: 11044 - DNA, 201 bp, Homo sapiens
gatgggccacgtctaccaaatgcactagggaattggaatttgtaattccatttgtcgacagggagaaaaatcatggactatcatacaatagacggggaaaytgagtcccatagaggctgagtcccatagaggctcaagattacgtagtaaattagagtcggagttagggctagaaacaagatcagcattcaatgcacatct

SEQ ID NO: 11045 - DNA, 201 bp, Homo sapiens
aattccatttgtcgacagggagaaaaatcatggactatcatacaatagacggggaaattgagtcccatagaggctgagtcccatagaggctcaagattacrtagtaaattagagtcggagttagggctagaaacaagatcagcattcaatgcacatcttcaacattttcttccctgtacctcattggaggctgtggagaaa

SEQ ID NO: 11046 - DNA, 201 bp, Homo sapiens
tgctgggtgagggggcctaattggagagcatgcgtcagtcagtcacccatctgctattaagacctacttatccaccccagggtctgaggaagggaccctgrcaatgctcctccaggcttagtctccttctctgcttccccttcccagcctcctgttgggtggtctggtccacctcctcaatttcgtggtgagtggagacgg

SEQ ID NO: 11047 - DNA, 201 bp, Homo sapiens
aaggtctttaaatgtgagacaggttcttacctcagagatagtttggccaggtttgcttcaagggcaggaaaatggaggagatgcccaaggattctgtgatyctgatggattctctgatcctgatcctaaacaggttgggatgtgtcttgggccctgtgctttctgccctgaggactcaggtttccccagcccagggcccac

SEQ ID NO: 11048 - DNA, 201 bp, Homo sapiens
cccttggaacatctttgtagtatggtttccccacacggtggctgctgctgggagtgggccttgctggagtttgtttcccttggatgagccttgtggggtgrgttgtcccctccctcttctgggaggggtttggattctcatcactgacaagaacagacacgacagatctttcctttaaagagggtggagggaattttggag

SEQ ID NO: 11049 - DNA, 201 bp, Homo sapiens
gggtaggaggaaagaagcacagaaggccagaacgggctgcaaaccagggagtgagggtgtgaatgaggaggctggaatggtaggcaggggctggattatgytgggaatcgtaggccttgttaagaaacttgggtcatgtcataggaactttggaatctttaaagattgggctttgtttagagcagatgggaagtagtagat

SEQ ID NO: 11050 - DNA, 201 bp, Homo sapiens
gaaagaagcacagaaggccagaacgggctgcaaaccagggagtgagggtgtgaatgaggaggctggaatggtaggcaggggctggattatgctgggaatcrtaggccttgttaagaaacttgggtcatgtcataggaactttggaatctttaaagattgggctttgtttagagcagatgggaagtagtagattctcccttt

SEQ ID NO: 11051 - DNA, 201 bp, Homo sapiens
ctttgggaggatgagaactgagggctgaaagactcttgttcccctgaggattgcttgcttctgttccaggatccagcctccagtcctgtacttcctggtgracacaggatttgggggtggtggggcagggcagggcggggcaggctaagaaagagaagaggatgaggagccaacaaaccacattttgctcaaccctaagca

SEQ ID NO: 11052 - DNA, 201 bp, Homo sapiens
gtgcacgcgtgtgtacgttcaggacagggcatgtgcacttccttttattggattcatctggaaccccatagtaaaatacacactaggacagagatttcatracattcctgagccacctttttcctctctttacctcttctcctcctaatgggggaggtaagagcaaatatcccaccttgtagttactttgtatatgtgaga

SEQ ID NO: 11053 - DNA, 201 bp, Homo sapiens
gttgcctactgcgagacagtgacacaaaatgtggacaaagagatcaattccaagtagttgctttaaatatatacatacgcacatgtatgtattacatacgyacatgtatgtattacatatgtacatgtatgtaatacatacatgtgcatattttcatatatgggtgtatgtctgttcatttagataatgtacctttaaacc

SEQ ID NO: 11054 - DNA, 201 bp, Homo sapiens
gagacagtgacacaaaatgtggacaaagagatcaattccaagtagttgctttaaatatatacatacgcacatgtatgtattacatacgcacatgtatgtawtacatatgtacatgtatgtaatacatacatgtgcatattttcatatatgggtgtatgtctgttcatttagataatgtacctttaaacctctcaagacacc

SEQ ID NO: 11055 - DNA, 201 bp, Homo sapiens
gttagaaattatgactctgagtcattgactaaattatctttcaggtatgctttaagacaaaatagggatgtatatgatacatttcagcaagatctctattmgaaaagaaaccaataaatgtctatccaaaaccgaaataaaaggctttggagcttcaagagatagatttctgtgactgaaaatccacttctttaggaagga

SEQ ID NO: 11056 - DNA, 201 bp, Homo sapiens
tgcaacctctgcctcccgggttcaagcaattctcctgcgacagccttttgagtagctgggattacaggcgcatgccaccacccctggctaatttttgtatwtttagtagagatggggtttcaccatgttggtcaggctggtctcaaactcatgacctcgtgatctgcccgcctcggcctcctaaagtgttgggattacagg

SEQ ID NO: 11057 - DNA, 201 bp, Homo sapiens
gtatgttcagcatggagcacagttcttggcacgtaggaagcactcaatctatattcattgagtgaatgagtaaatgaatgaatgtgagggagtatctgctwtcctctccccacccagccccttctgccccgttcatcctcctacctccacactccaagtttggaacccaaagctgtgcctccagctgtgaacctccaaggt

SEQ ID NO: 11058 - DNA, 201 bp, Homo sapiens
gaggtccatgtgactggggagggtggtgtatgtggacctgaagaagcaattaagtgcttcctgttcctctggggccactgtagcacccacagaacactttytgatacctgttgtgtgcccagccctgttctaggtgctggggtgctggcactagaatgaagcaattgatcagttaccaaccagggggtaagctaagaaaag

SEQ ID NO: 11059 - DNA, 201 bp, Homo sapiens
cacgaggtcaggagatcgagaccatcctggcaacgtggtgaaaccctgtctctcctaaaaacacaaaaattagctgggtgtagtggcacgtgcttatagtytcagccactcaggaggctgaggagaatcgcttgaacccaggaggtggaggttgcagtgagccgagattgcaccactgcactccagcctggcaacagagca

SEQ ID NO: 11060 - DNA, 201 bp, Homo sapiens
ggcaggtgttccgcgggatcgagacccgccccggcagcacccccggccccctccccaggtccccagctccatgtatgcaaatcactgctttgcatgggccyggggccaggcgcggggctcctgccagggggcgtggccggcggcccccgccccgcgccgcgtgctcacctggggagtgtggcaatcctggcggcgccgagt

SEQ ID NO: 11061 - DNA, 201 bp, Homo sapiens
ggtccctctctagggtcccttagtccaggatcctcttttggaaatgtggtctcttttgagtcccattttcccccgccaaggtaatcctgtatcctactgakcttgataaatagtacttctcctgtgaattcccagggctgggtccttggggtctcctccttaattgacttactggaggagtttggatgggggaaggaggag

SEQ ID NO: 11062 - DNA, 201 bp, Homo sapiens
cagtctctgactcagggcctcttctcagcactgttgaagaatccccatggtgaagtatgagctgagcagatctgcgttaggcaatgcccagctccaggggrgatagtacttaatgggtgggagaggggagcccgtttctccattggaacagaaggccagtggcagcagaagccctttgcaaatgtgtctgggcggtccata

SEQ ID NO: 11063 - DNA, 201 bp, Homo sapiens
atagctctctatttttacctccatagttcaagccttgctttgaaagctccatataattaaaaagaacttaaagatgagtataaattgtagcaccaccaaawaactttaatagcattccaaccagacctcaattagtctttcatctggatcattagagacatagaaattagaagtggaagagaatcaatgtcccccagagct

SEQ ID NO: 11064 - DNA, 201 bp, Homo sapiens
tggagaaatggaggctggtgatgagaaagaaccttagctacttttcccaagctcccatacctagagaatgacagaactaagcctgagtctttctagtgacyttctacctaaagatggtggtaggaagactgggagtcaacgtagagaaccagggacaggggacataagacaatggtagctgtctgggcgcggtggctcatg

SEQ ID NO: 11065 - DNA, 201 bp, Homo sapiens
actagagtgtggtagggtgatcatagctccccgcaaccttgaactcctatgctcaagtgatcctcctgtctcagcctctggagtaactgggactacaggtrtgcaccactatgcccagctaatttttttaaattatctctttgtagagccaggatcttgctatgttgcccaagctggtcttgaactcctggcctgaagcaa

SEQ ID NO: 11066 - DNA, 201 bp, Homo sapiens
tggcacgatcttggctcactgcaacctccgcctcccaggtttaagcgattctcctgcctcagccttctcagtagctgggattacaggcccaccaccaccaygcctggctaatttttgtatttttagtagggacggggtttcaccgtgttggccaggctggtctcaaactcctgacctcaagtgatttgcctgcatcggcct

SEQ ID NO: 11067 - DNA, 201 bp, Homo sapiens
tacaggcatgagcctccgcacccagccttgttctgcccttctcagagtggctcccaccccaccttgtttctgctttctgtgacagggaaattagtaagtastgattcgccactcagcctgcagactgtggctccatgtgccagagatcgcagaacagcctgtggtgccaggatttgcttctctgcctccagcactcagaga

SEQ ID NO: 11068 - DNA, 201 bp, Homo sapiens
agcagtggcctgagtgcctggacacttttttctgaaacctggtgccgtctgctcagggtgctccttctgcttagccctgaccatgctgccacttttgcccytggctctatgactgcagcatcagtgtgtggccaacaggggatggggttgaggcagggatctcctgttgcatgggaagcccagagggccccatctcagact

SEQ ID NO: 11069 - DNA, 201 bp, Homo sapiens
ttggtggagatgcacagtcctgggcactgtgtgggagcagggatatgctggcgttggggggttaagttgggtcttcgatgagtcctcagacattctccgartttgagatgccagaacctcgcacggtgactcatgcctgtaatcccagcactttgggatgccgaggcaggaggattgcttgagctcaggagttccaggtta

SEQ ID NO: 11070 - DNA, 201 bp, Homo sapiens
ccagaacctcgcacggtgactcatgcctgtaatcccagcactttgggatgccgaggcaggaggattgcttgagctcaggagttccaggttagcttggacarcatagtgagaccctgtctttacaatttttttttaaattagtcagttgtggtagcacacctgtggtcctacctactggaaaggctgaggtgggaggattgc

SEQ ID NO: 11071 - DNA, 201 bp, Homo sapiens
atgcctgtaatcccagcactttgggatgccgaggcaggaggattgcttgagctcaggagttccaggttagcttggacaacatagtgagaccctgtctttamaatttttttttaaattagtcagttgtggtagcacacctgtggtcctacctactggaaaggctgaggtgggaggattgcttgagccggggaggtcaaggct

SEQ ID NO: 11072 - DNA, 201 bp, Homo sapiens
atttgatccgcatctatcttctttattagcctaagctgttgattaaggtctaaaaccatactcaatttttttctgcgtcactcaatgcgttggagttatcrgaaaaactgtgtgagtttggtagttaagaaatctgagctgttgtcctggttcaggttctctgaggctatgtgtggcctcaggaaggtgttttcccctctg

SEQ ID NO: 11073 - DNA, 201 bp, Homo sapiens
ctttcagagggagcagcatatgcaaagtccccaacacaagatcagactccaccttttgggggggtggtctagggtgtctggaacccagctctgcagtttaraagcctagccatcagcttatctcactcaattctcactgtattcctgggaaaggaatgaaacaagaatcatgaccttgttttaccactgagatatcaggag

SEQ ID NO: 11074 - DNA, 201 bp, Homo sapiens
gaacagcaccttgcacatagactgtgcttagtaaatacttgttgaattaatgaatgtgttcttttgtcaagtctttgaacattactccttattaacccaaygttacaacatcacaatgtcacaaagggattttttttaagagaaaagcaattttaccttcatctacccctttcaacacagctattgcggctgtgggtcctt

SEQ ID NO: 11075 - DNA, 201 bp, Homo sapiens
gctgcgctgactgagtgattaggtggatatggagcagaatgttcaggcaggagataattggcaagattaaataactctccatggacacaagggcctgtcasggggtggagggcaaggggaaggatagcattagaagaaatacctgataaaatgacgggttgatgggtgcagcaaaccatcatggcacgtgtatacctatgt

SEQ ID NO: 11076 - DNA, 201 bp, Homo sapiens
ttcagcccaacatttatggtaacagttgagggtgagaaaaaacaagaaagacagctgtctagctgacatactttaggtgtcatctctcctggagggctggrctagtagcatgacttctgtcctagggagtcctttgggatccatgctggtctcttcttggtcccttggtccctggagggatgtagcagctgccatctgagg

SEQ ID NO: 11077 - DNA, 201 bp, Homo sapiens
tcagatgtaagacaggcctgtctgactttctaccataccaggctgcttttgagagaaagaggacagacagagagagagagagaaaaagagagagagagagwgagtgtgtgtttgtgtgtgtgcactcctgcaaatgagacatgacctaatgttacccagagcccctcacttgacatgtgtccagtacttttccatgtttcc

SEQ ID NO: 11078 - DNA, 201 bp, Homo sapiens
gtggagaagtgttcccacccaaagagggttcccctggcccttcgagaagccgcctccctgggcctgtgcgtgagaagggtccagggaagaggcagtgtttrcctgtgtgtgcctgcagggagggggcgggccctggctttctctttgcccccaagtcaaagagggctctgcctgcagctcttgtaaccaaccagagagtcg

SEQ ID NO: 11079 - DNA, 201 bp, Homo sapiens
gggagggggcgggccctggctttctctttgcccccaagtcaaagagggctctgcctgcagctcttgtaaccaaccagagagtcgtcttctcccagaatcayagccttggctaaaaataaactttttccaccttaaagcttccttccccctagtctgacccttaagcggctttggaggccaccctggggctcaggtgctgtt

SEQ ID NO: 11080 - DNA, 201 bp, Homo sapiens
tgaatcttggctccaccaacacaatctgtgtaacctggtgacttatgctctccaagtgtcagtttcctctctgttcaatgggaggaaaaataggatcaacyttataatgctgttaggaggaggattcaatgaatcttgagtgtaaagtgtcttggacacagtagacactcaataactgtgagttgttgttattcccattgc

SEQ ID NO: 11081 - DNA, 201 bp, Homo sapiens
ctctgttcaatgggaggaaaaataggatcaaccttataatgctgttaggaggaggattcaatgaatcttgagtgtaaagtgtcttggacacagtagacacycaataactgtgagttgttgttattcccattgcaacaatttagcagcaatgttggttccagttgccccatttcatatccatgtggctccagttcacccctt

SEQ ID NO: 11082 - DNA, 201 bp, Homo sapiens
tgccctgcccaccagtcagtggaatatttgggaaaagggtctgtatcatatttatggtagaacagtgcctgtgcggttcagttactggtgcattcagtaastgtgttctaaataaatgcatggaggcaagcggatcacttgaggtcaggagtttgagaccagcctggccaacatggtaaaaccccatctctactaaaaata

SEQ ID NO: 11083 - DNA, 201 bp, Homo sapiens
acatggtaaaaccccatctctactaaaaatacaaaaaattagtggggcacggtggtgcgcacctgtaatcccagctacttgggaggctgaggcaggagaaycacttgaacctgggaggcggagattgcagtgagctgagatctcaccatggcactccagtctgggtgacaagagcaagactccatctcaaaaataaataca

SEQ ID NO: 11084 - DNA, 201 bp, Homo sapiens
ttataaaaaaatttcataataaagattaaaaaggaagattatttttatccctgttcatgctcagtcctcttcccagaggtaactccttttatcagggtagygtatatatgtctggaagactttttctctggatatatattacaaatggaaatgtataaatttttgtggcctacacacatatgtacaaattataccgtatat

SEQ ID NO: 11085 - DNA, 201 bp, Homo sapiens
ggtagtgtatatatgtctggaagactttttctctggatatatattacaaatggaaatgtataaatttttgtggcctacacacatatgtacaaattataccrtatatattctttagtggcttttaaaatttttaaataatgtttataggttgtttcatggcagtacatagagagttatatgatttttgttaatgaccacata

SEQ ID NO: 11086 - DNA, 201 bp, Homo sapiens
ccttttatacatagggaaactcagatacactggtagagtcccttggctcaagtccactcagccttttggtaacaaatttggtagctgctccctagccttasagaatttatcttaaactgtcaattgagtaggttcagccaacccttgtgcctagagccctagagccctgtccccagctaataggtgtaacaggataggcac

SEQ ID NO: 11087 - DNA, 201 bp, Homo sapiens
cagtgctgcattgcctcacttatccagagagccagtagccaacctatttagacagctgacagtaagaaggaagcaaatgagacctcaagccaggccctttytcagagccttaaacttttattttagggatggtctactgagcttaatgatgtggtttttctaacccttagcagataaaagtgcaaattcaagctggaatag

SEQ ID NO: 11088 - DNA, 201 bp, Homo sapiens
acagaagcagagataaacttgattgtgagaaaggaagaaaaaaaaactgggaaaagcagagctcagagctgaaaaaaaagaaaagaaagaaagaaaacaamcaaaaaaaccaaaaaaaaaaaaaaaaaaaaacaagaaaaaagggcagtctggggccatacagtactacagccaacagaggtcaaacacatcagtatccct

SEQ ID NO: 11089 - DNA, 201 bp, Homo sapiens
ttcatctataaaatgggtcttgtaacatagcaagcatacttacatgcttataagtctactcctactctctctttatacattataaatttcttttctttttycttttttttttttgagatggagtctagctctgtcgcccaggctggagtgcagtggcgcaatcttggcttactgcaagctccacctcccgggttcacacca

SEQ ID NO: 11090 - DNA, 201 bp, Homo sapiens
tcatctataaaatgggtcttgtaacatagcaagcatacttacatgcttataagtctactcctactctctctttatacattataaatttcttttcttttttyttttttttttttgagatggagtctagctctgtcgcccaggctggagtgcagtggcgcaatcttggcttactgcaagctccacctcccgggttcacaccat

SEQ ID NO: 11091 - DNA, 201 bp, Homo sapiens
catttgccaatcctttatatatcagttacaaaacagaaactcttcctcactgctagggagaagtgtagaaagggggagaaagaaaaaaaaatcttgcctgwaattgaaggcaggttgggagatgttcacgctttgaaacgctccttcttgtgaaatgtttatgaaacactttccacaaacgagttatgcaactgggacaac

SEQ ID NO: 11092 - DNA, 201 bp, Homo sapiens
ctattctctctcctacccttgggatgtgtgtaatattttttggtagataaagcaccagaggagggtcaggagaccactctcttgtcagagttctgccgggktattgctatatgagtttataaccatctctgaagctctctgagcctctgtgagatggaagggtgaacacttgtcctcacacctcctggctatgagggtaaa

SEQ ID NO: 11093 - DNA, 201 bp, Homo sapiens
ctctctccttccagaatgaggctactgctttctgaagtaagtgatgtcagagagttcactgggatcagaaaagataatcatccctgatacatttttacctycctggtcactgcccaagactcagtgtaatacctttgcacagcacagtgggtggagaagatcctaaaccaacaaagcttgtccaatagctggacaggctgc

SEQ ID NO: 11094 - DNA, 201 bp, Homo sapiens
gagttcactgggatcagaaaagataatcatccctgatacatttttaccttcctggtcactgcccaagactcagtgtaatacctttgcacagcacagtgggyggagaagatcctaaaccaacaaagcttgtccaatagctggacaggctgctcagtggctgtggcagggcagagcaccctgtggtgacccacgtctccaggg

SEQ ID NO: 11095 - DNA, 201 bp, Homo sapiens
ccaatttgcctccggttctcacattagaagtcaatgggatccaacagaagtctctctatctcatcttccagatccacaaccaacacccagttgcctggaawgcttccaaccttttccccttaacagctgtaaaaagggatttttgtaaattcaggaaggctttatttcttaatttcttcatttctgaacccctgagagtgt

SEQ ID NO: 11096 - DNA, 201 bp, Homo sapiens
aggaagcagatgaaagggtgcgttttcttttatgatggcgctggtttctgaaattaagtgttgcaggaagacctggcacagattctaacagatagcgcccrggttggaggcaaagcacatgttttcaagctctgtcatagctgcctctccttatctctcccttgtgcataatgagtctacagaggaaccctgccacttgcc

SEQ ID NO: 11097 - DNA, 201 bp, Homo sapiens
ccccattcattcatctctcaggtgtttcttgagcctcttatccatgttaggaactgtggtcattttgtggccactgaggacaaaaaaaatgggtgtcactstccagctcccaaggaatatatagatgcatatatatagcatattgtatatgcatattaatatatatgcatatgctgcgtagtgctgggctctgagggtacc

SEQ ID NO: 11098 - DNA, 201 bp, Homo sapiens
gaaatgggttttgcttatgtcttttgttcaattaatgttctttgggttttcactatgtgaaaggcaccatatttaggacattagctccctcctcagtctcraatgttagtaggatcttcctaattgtccaaccaaagataattcttttttcattttatctaacttttattttaagttcaggggtacatgtccaggtttgtt

SEQ ID NO: 11099 - DNA, 201 bp, Homo sapiens
ttttattttaagttcaggggtacatgtccaggtttgttatacaggtaaacttgtatcatgggagttggttgtacagattatttcatcacccacatattaarctgagtacccattagttatttttcctgatcctctccctcctctcaccttctaccctccaacaggccccagtgcgtgttgttcccctctatgtattctcat

SEQ ID NO: 11100 - DNA, 201 bp, Homo sapiens
agttcaggggtacatgtccaggtttgttatacaggtaaacttgtatcatgggagttggttgtacagattatttcatcacccacatattaaactgagtaccyattagttatttttcctgatcctctccctcctctcaccttctaccctccaacaggccccagtgcgtgttgttcccctctatgtattctcatgatttagctc

SEQ ID NO: 11101 - DNA, 201 bp, Homo sapiens
atggtgtatatataccgcattttctttatccagtctatcattgactggcatttaggttgattccatgtctttgctatgaatagtgttgcgatgaacataamccgtgcatatgtctttataatagagctgtttataaggaattctttctttagtgatccaaagcaccatttttttccgcaagaattaagcacaagtttagct

SEQ ID NO: 11102 - DNA, 201 bp, Homo sapiens
gtgtatatataccgcattttctttatccagtctatcattgactggcatttaggttgattccatgtctttgctatgaatagtgttgcgatgaacataacccktgcatatgtctttataatagagctgtttataaggaattctttctttagtgatccaaagcaccatttttttccgcaagaattaagcacaagtttagctgtt

SEQ ID NO: 11103 - DNA, 201 bp, Homo sapiens
caagaaaatggtttaagccagcatctctatggctaagagtttctatctggatagggaacaaccagatgtccacataggagggtctccccaatatctcttawaagtatggtctagagctcgtgcccccatcacattatatgaatttaaagtcacatggacaccctcccaagggacttcctgaaaagctgcaagagggtagtt

SEQ ID NO: 11104 - DNA, 201 bp, Homo sapiens
ttcatctctcaggtgtttcttgagcctcttatccatgttaggaactgtggtcattttgtggccactgaggacaaaaaaaatgggtgtcactgtccagctcycaaggaatatatagatgcatatatatagcatattgtatatgcatattaatatatatgcatatgctgcgtagtgctgggctctgagggtaccgtatttagt

SEQ ID NO: 11105 - DNA, 201 bp, Homo sapiens
cagaggatggagaggtgtggagacaaatgagatggggagggagactcctccagatcagtggtgcccagattttggggtttcatagatgagattccattgargaaaataaaacacagaatttgagggagatcagtaaagagttgccagttttttactctgtgaggtaaagagttttaagaatgccatttaggatcactatcc

SEQ ID NO: 11106 - DNA, 201 bp, Homo sapiens
tgagggagatcagtaaagagttgccagttttttactctgtgaggtaaagagttttaagaatgccatttaggatcactatcctgtcctaaataaattttaamcttcttcctcctaagaaaaaaaagaatatcatctcagaatttctaagaatttaatccatttttttttaagagacagggtctcactgtgtcacctaggctg

SEQ ID NO: 11107 - DNA, 201 bp, Homo sapiens
taaataaattttaaccttcttcctcctaagaaaaaaaagaatatcatctcagaatttctaagaatttaatccatttttttttaagagacagggtctcactstgtcacctaggctggagtgcagtggcgtgatcatagctcactgcagcctcaaactcctgggctcaaatgatcctcctatctcagcctcccaagtagctgg

SEQ ID NO: 11108 - DNA, 201 bp, Homo sapiens
aagaaaaaaaagaatatcatctcagaatttctaagaatttaatccatttttttttaagagacagggtctcactgtgtcacctaggctggagtgcagtggcrtgatcatagctcactgcagcctcaaactcctgggctcaaatgatcctcctatctcagcctcccaagtagctgggactataggcatgtaacaccatgcctg

SEQ ID NO: 11109 - DNA, 201 bp, Homo sapiens
caggtgtttcttgagcctcttatccatgttaggaactgtggtcattttgtggccactgaggacaaaaaaaatgggtgtcactgtccagctcccaaggaatwtatagatgcatatatatagcatattgtatatgcatattaatatatatgcatatgctgcgtagtgctgggctctgagggtaccgtatttagtaaataatta

SEQ ID NO: 11110 - DNA, 201 bp, Homo sapiens
aggtgtttcttgagcctcttatccatgttaggaactgtggtcattttgtggccactgaggacaaaaaaaatgggtgtcactgtccagctcccaaggaatayatagatgcatatatatagcatattgtatatgcatattaatatatatgcatatgctgcgtagtgctgggctctgagggtaccgtatttagtaaataattat

SEQ ID NO: 11111 - DNA, 201 bp, Homo sapiens
tctcagcagggatcacctgggggagaaagagccacccctttctggaaacacataagaatatgcatctgtcccttcacctgccatttagcagggcttctcakgtcttctctatgtgcacaaacctaagctcaacctcatggggcacagagctctggcgtctccattgcagaggactccccgatcccccaagcatcggaatta

SEQ ID NO: 11112 - DNA, 201 bp, Homo sapiens
ctcccaccccaacaccctccaggaaagattctggcccaggaaacagccgaggcatggcttttagcataaccaggtggcatgagatttaaaaagaattggayagttggggattgcatgttatctctaggataaactttgagagatgggtcatacccaggctttgccttcagggcattttatagtctagttgggagacaggac

SEQ ID NO: 11113 - DNA, 201 bp, Homo sapiens
accaggtggcatgagatttaaaaagaattggatagttggggattgcatgttatctctaggataaactttgagagatgggtcatacccaggctttgccttcrgggcattttatagtctagttgggagacaggactgacacatacaaaaattaactcaggaggcaagggttaagtaacaatatgtagtaaggactcctaggct

SEQ ID NO: 11114 - DNA, 201 bp, Homo sapiens
caatttcgtggtgagtggagacggaaggtgcaggcgtggagcagagctatgctgtacaagggaggggaagcgccctgggaaatgcagtacagacaagtccyaattccttggaaatctctcctggacacagattcagacttgcttcctggaagcctggctgtgattctatttggagagagcagcagtgccacccacaggttg

SEQ ID NO: 11115 - DNA, 201 bp, Homo sapiens
gaacttctccctggccaagagcaaatagattgaactattaataaatagctaacatttcttgagcatgatgtgccaggagctcttctgagtaatttttctgrcattcctcaaaataaccttgtaaagtaggtagttctattatgcctctggtgacctactgggaagttccagaaccgtttagctgagacccatactcttggt

SEQ ID NO: 11116 - DNA, 201 bp, Homo sapiens
aatagattgaactattaataaatagctaacatttcttgagcatgatgtgccaggagctcttctgagtaatttttctgacattcctcaaaataaccttgtamagtaggtagttctattatgcctctggtgacctactgggaagttccagaaccgtttagctgagacccatactcttggtcatcacagtgtgctgcctgtccc

SEQ ID NO: 11117 - DNA, 201 bp, Homo sapiens
atagattgaactattaataaatagctaacatttcttgagcatgatgtgccaggagctcttctgagtaatttttctgacattcctcaaaataaccttgtaargtaggtagttctattatgcctctggtgacctactgggaagttccagaaccgtttagctgagacccatactcttggtcatcacagtgtgctgcctgtccca

SEQ ID NO: 11118 - DNA, 201 bp, Homo sapiens
tgttaggaactgtggtcattttgtggccactgaggacaaaaaaaatgggtgtcactgtccagctcccaaggaatatatagatgcatatatatagcatattktatatgcatattaatatatatgcatatgctgcgtagtgctgggctctgagggtaccgtatttagtaaataattattttccttgctgttatagaaccaata

SEQ ID NO: 11119 - DNA, 201 bp, Homo sapiens
gaccctccttagcctctacgcctctccagacaggcgggcaggtggaaggactggtttggggactgctgtttacatgtctgtttatccctgtatctgatttrcctccacctgtatgtggcaatgcctggcagtgctaggagggcctctccatgggacttgaggtgggtggagggacctgatcaggtggcagggggtggggac

SEQ ID NO: 11120 - DNA, 201 bp, Homo sapiens
gtacagttaataacctgcacagctgcatgagatggctctgcacagatggttgggcagaatggttgggaatgactgcagagatctctgtgctaagatccccrtggctcaccaagagcccggccttcagagagggctgaggccactaaaagtacctggaggggaagctcgccatctagtggttgaaatggggacaccagcatc

SEQ ID NO: 11121 - DNA, 201 bp, Homo sapiens
aatgacttaagcccaggaggttgacgctgcagtgagcagtgattgtgccactacactctagcctgggtgacagagtgagatcctgattcaaaaaaaaaaaraagaagaagaagaaaaagagagaaagaaagaatatctcctagcaacccaaatgtgatcaaggtgcattttataaaggtactgattaaaatacctttgatt

SEQ ID NO: 11122 - DNA, 201 bp, Homo sapiens
tgccagtagcatccacccccagttgaaacagccaagaatctctccagacattgccaaatgtcccagggggagtggtggtgatgcagagtcccccccggttragaactgccggcctaggcagagagagggagtgagccagtctccagggctgggctctattcagtcgattcatatggattcgtggttacactggagagggag

SEQ ID NO: 11123 - DNA, 201 bp, Homo sapiens
gtatttggtaggaagagaaagaaacggaccagcatcgagaccaacatccgcctgactctggagaagaggtttcaagatgtgagcagcaccttcgggtgggmacgggtgggctacctcacacaggtagggagagcagacacggcccaggccccttggcaccagcccctccgcacctcacacctgctctgggacacgatcaga

SEQ ID NO: 11124 - DNA, 201 bp, Homo sapiens
ggtttcaagatgtgagcagcaccttcgggtgggcacgggtgggctacctcacacaggtagggagagcagacacggcccaggccccttggcaccagcccctycgcacctcacacctgctctgggacacgatcagaaaacacattatcccactccaggcgcccaggtattggagtgcaaagctgccctccatctcaggttcca

SEQ ID NO: 11125 - DNA, 201 bp, Homo sapiens
gaaaaaaaacgcccatcgccaaatgccatctgacctcatttccttctactccttcttttctatgcacatttagatacttgtgatcgtgttatacacctacrttttttggaacttgtagcaaaagcatgtttttgagccagtatgtggaagctgtgagccccgtgtgggctggggaagagaagagggagaaacagatgtggc

SEQ ID NO: 11126 - DNA, 201 bp, Homo sapiens
tccacatgttttagctttctcattttctgctttgagacaggaggacaggaagaaatgacaaggcaggccaggcatggtgactcatgcctgtaatcccagcmctttgggaggccgaggcaggtggatcacctgaggtcaggagttcaagaccagcctgcccaacatggtgaaaccccatctctacttaaagtacaaaaatta

SEQ ID NO: 11127 - DNA, 201 bp, Homo sapiens
gaagcagagagaattgcttgaacccgggaggcgcaggttgcagtgagcggagatcgcgccactgcactccagcctaggcaacagagcgagactccgtctcmaaaaaaaaaaaaaaaaaaaaaaaaaaaaaaaaaaaaagaaatgacaagggagaaggacatcaggtaataaggaagaacacagaagggagcagcagctctg

SEQ ID NO: 11128 - DNA, 201 bp, Homo sapiens
agagtagtgtacaaggcagaaggaacagcctgtgagaaggcatggaattttttaaattttttatttatttttattttttttgagacagagttttgctcttyttgcccaggctggagtgcaatggtgcgatctaggctcactgcaacctccacctcctgggttcgagtaattctcctgcctcagcctcctgagtagctggga

SEQ ID NO: 11129 - DNA, 201 bp, Homo sapiens
tttatttttattttttttgagacagagttttgctcttcttgcccaggctggagtgcaatggtgcgatctaggctcactgcaacctccacctcctgggttcragtaattctcctgcctcagcctcctgagtagctgggattacaggcacccaccatcacacctggctaattttgtatgtttagtagagacggggtttcacca

SEQ ID NO: 11130 - DNA, 201 bp, Homo sapiens
ccagggagtgagggtgtgaatgaggaggctggaatggtaggcaggggctggattatgctgggaatcgtaggccttgttaagaaacttgggtcatgtcatasgaactttggaatctttaaagattgggctttgtttagagcagatgggaagtagtagattctccctttggttcagtgccaacccaggacatcaacatggtga

SEQ ID NO: 11131 - DNA, 201 bp, Homo sapiens
atgggtggatcacctgaggttaggagttcgagaccagcctggccgacgtggcaaaaccctgtctctactaaaaatacaaaaattagctgggcatggtggcrggtgcctgtaatcccagctactcgggagattgagacaaaagaatcgcttgaacccaggaggcagaggttgcagtgaaccgtgatcgtgccattgcactcc

SEQ ID NO: 11132 - DNA, 201 bp, Homo sapiens
acaggcccccagcctactgaggaggctcattgtataaggaaaagtaaatgaaaacaggaaaaccatttctgattaatgacgaaataagtacatgctgcatmctgttagggtgggatcttccaaactggggagagcagaactacctttcaatagcctttgcgaacacctggtcagagcttcccctgttagcatgagaagaat

SEQ ID NO: 11133 - DNA, 201 bp, Homo sapiens
aggcccccagcctactgaggaggctcattgtataaggaaaagtaaatgaaaacaggaaaaccatttctgattaatgacgaaataagtacatgctgcatcckgttagggtgggatcttccaaactggggagagcagaactacctttcaatagcctttgcgaacacctggtcagagcttcccctgttagcatgagaagaataa

SEQ ID NO: 11134 - DNA, 201 bp, Homo sapiens
cattcatccatcacagtgggaaagcctgcgagaggctgctaggctgagcaaccctgctgtcctcagcaaaagcagggttcttttagggaaaaagcaatggrgaccagaaaatgacaggcaaccagcagtatctgccacagcagggcccaagaggcttgtcttgctcacctccagggctctcaggcaaggcagccttcggct

SEQ ID NO: 11135 - DNA, 201 bp, Homo sapiens
cattgttctttttgtttttgttttgttttgttttttgagacagcgtcttgctctgttgcccaggcaatgtggtgacacaatcatggctaactgcagcctcracctcccaggctcaagtgatcctcccacctcagcctcctgagtagctgagactacaggtgcatgtcatcacacctggctaatttttgtattttttgcaga

SEQ ID NO: 11136 - DNA, 201 bp, Homo sapiens
ccatgttgcccaggttgatcttgaattcctgggcttaatcggccctcctgcctcagcctcccaaaagtgttgggctacaggcatgagccaccatgcccagytcagttcattactctagtttctagaaaaccaagcaccttttctttgtggagactggagaactagagcagctggcaatctttcatcgtgccctcaagttct

SEQ ID NO: 11137 - DNA, 201 bp, Homo sapiens
aggagacccaaaggaaggttgtgcggcagctccagtcctggagagctatgtgaataggaaaagcaattttcctattcacatagcaaaagagtgaaaatgaytctgctaacaataggtataagtttaagcaaatcatggtatatccatataatataatattatgtaaccattaaaaatgatacttataagcatagaagcatt

SEQ ID NO: 11138 - DNA, 201 bp, Homo sapiens; identical to SEQ ID NO: 4262

SEQ ID NO: 11139 - DNA, 201 bp, Homo sapiens; identical to SEQ ID NO: 4263

SEQ ID NO: 11140 - DNA, 201 bp, Homo sapiens; identical to SEQ ID NO: 4264

SEQ ID NO: 11141 - DNA, 201 bp, Homo sapiens; identical to SEQ ID NO: 4265

SEQ ID NO: 11142 - DNA, 201 bp, Homo sapiens; identical to SEQ ID NO: 4266

SEQ ID NO: 11143 - DNA, 201 bp, Homo sapiens
cctcccctcctacatcacagaaagcagaagcctcgagaggagaagcctcttcaccactccctggcctacgctggcacccaccttcccagttcccctcctgwcctcatggagacatgtcttttctccccactctcccggacctccctctctgggggaaatgatcccctcttcctctagcattgctccctttcctgcttcctt

SEQ ID NO: 11144 - DNA, 201 bp, Homo sapiens
tagcccaacgggccaggagcacctgtcactgcgttgactgagcagaaacaaccaagctggctgactccaactagggttctgggctgaggtctggtctttgrtggggagcagggactggaagacccaatggtagtctgaaactaaaattcaacatccccatcttgcctagacctggggccctcccctgtgcatcccccagcc

SEQ ID NO: 11145 - DNA, 201 bp, Homo sapiens
ggtgggtccaggcagccaggaaagggctggctgaggcagaggctgaggctgggctctgtcgaaggtgcagttagaaagatccagctcaggtccaatgccgkcctcaaagtcaaaaaaattgattggaagcagagttgctgttatgttgtctttaaattaaatatatgttgctattatcaatgattctgaacttttaagtgc

SEQ ID NO: 11146 - DNA, 201 bp, Homo sapiens
gggcaccccagccttctaagcctcagggcacatgagggagaagcagggaagagtagaaacgtctctgctgagccatatgtttgttctgttttctggggtawgtccccctccttgtgggcctcaggtccctcaaatgaagggttcaatgatatctaggttctttctacctcgttatctgataagagaaggggaagctcagat

SEQ ID NO: 11147 - DNA, 201 bp, Homo sapiens
gggctccctgctccctgactaaaaacaggcagagaagtagacccgagacagccagctagggaggcagataagagacaaaggaaaacagtgggaagccagckggtgggggcacacctggtttgccccaggtgtctctttctctgcccttctcctcactgtgagcttttccccaccaaggttgggaaaggggggctgagtctc

SEQ ID NO: 11148 - DNA, 201 bp, Homo sapiens
ctccctgctccctgactaaaaacaggcagagaagtagacccgagacagccagctagggaggcagataagagacaaaggaaaacagtgggaagccagctggygggggcacacctggtttgccccaggtgtctctttctctgcccttctcctcactgtgagcttttccccaccaaggttgggaaaggggggctgagtctcaca

SEQ ID NO: 11149 - DNA, 201 bp, Homo sapiens
agtatcaggctcaggggggttgacattttcctctctatctcactccagcccagagctcaaaaaaccggtttcatggagtctccaagaactgctaaaggagraaggggtaaaggagttctctacgttcccattctagctcatctaactgaaatgatcagtgagcaagtctgagagagaaggaataaagattgctcaccattc

SEQ ID NO: 11150 - DNA, 201 bp, Homo sapiens
aggggtcagaattgatgacagtttcaaaaccacagcatcctggagtaaggcttctgctactctgaaaaaagtcctccagctgttgagagaggtggggtaarggagggagggagggatgatttgcatttaatttgcatttcatttacatatagttcttttgatgtccaaaggcacagaaatttcctgtcctggcttcttttt

SEQ ID NO: 11151 - DNA, 201 bp, Homo sapiens
gcacccagctcccctagcagatctgatatatcatcatagctgatctcaaaaccaggctttgctcagagatcattttgcatctcacctcttcctctttctcrggaccccacctgctcttcatcctctgctgccaccttgccagcccacctgctctcagagatgcgtcatgacctcatgaccacacaggaaagggctgtactt

SEQ ID NO: 11152 - DNA, 201 bp, Homo sapiens
tccttttgtagaagtttgatgctctcagggtgataatcccagtttgtgtggccaaaggcacacctaggctgctatatagtaggtttgattagagtccaggrgctggatgaggtcatctccccaagcacttcctagaggcatctgaggaggcaggagccttggactcctaaggaacagctaagagccatggagatgggagaa

SEQ ID NO: 11153 - DNA, 201 bp, Homo sapiens
atatctgggggaatgaatgttctaggcagaggacctagcaagtgaaaagagccagtatgcttaagaaacagcaaggcaaccagtgtggctggggacagaaygagaaaggggaccagaagtaggagaggaagtcagagaggaaacaggaagcagagcgcccaagatcttggaggacattgaaaggcccctggctttcagttt

SEQ ID NO: 11154 - DNA, 201 bp, Homo sapiens
gggagcatccagtaaataaataagcaaagagatgctgtatagaatatagtataaagaagggcgagggaatagaaggggatagcggggagatactctttcartagagaggtcagagaggacctccctgaaaagggtgtgtgaacagagacctagagttgtcagggaatgaaatacatggatatctgggggaatgaatgttct

SEQ ID NO: 11155 - DNA, 201 bp, Homo sapiens
taaagttgtagtggtggtggtcattttgaaataagtagtttatcatctatttctagtttttaaaaacttgctaacacatgttttcctggaatctaaggatrtggaaactctaattttggggagaagaactaggacaccagagtttcttagagatgccaagtgtggatgggcacagctgaaggggcatggagcaaagaagtg

SEQ ID NO: 11156 - DNA, 201 bp, Homo sapiens
agagatgcgtcatgacctcatgaccacacaggaaagggctgtacttgcccatggttgtttaggacacagctgaggaaaaggggttaaaacagggaattctsttagaccccattcattcatctctcaggtgtttcttgagcctcttatccatgttaggaactgtggtcattttgtggccactgaggacaaaaaaaatgggtg

SEQ ID NO: 11157 - DNA, 201 bp, Homo sapiens
caccacgtcatggaaaggacatggcatctccactctctgacaagccctgacccctctgagcctcactttgctcagtggtaacacaggatttctgtaattcyggccctgcagacctcacaggcagggtgaggatcaaacaagaaatggacatggaagtgtgctgcaaaacgaaggaacaactgcatttgagccaggcatttt

SEQ ID NO: 11158 - DNA, 201 bp, Homo sapiens
gtctgccttgggcatggcttgcacacacgcggtgtctttgcatttgctatccacaccctggcttgacccaggactctcagctagtggagaaataagactcrgacctcccaactcctaaaccagtgctcttcccacagtccctcatggggcctcctgggtcctattcttcaggtggcttcaaggattgctttcaggcttctc

SEQ ID NO: 11159 - DNA, 201 bp, Homo sapiens
aaggctacggagattaagccacttgccaaagttgagcatgaaacagcctccaaagtgaccctagaacccagtttactgtgcattttctggacagaactctraccattaggccacacttcccagttccttggatgaatctcaagtaccaaaaaatgtaggcataatgtctgggggcatcctggaaaaaacttgttttgggct

SEQ ID NO: 11160 - DNA, 201 bp, Homo sapiens
tccacctccctcacccagagaattgctccccaggcaaactcacatcccagggctgccaaagctatgcaaatcagccttctagcctgggctgttggctcatsttggaggtgggaaagcaggaccctcctaggggccccacgcctagctcctggtgttaggggcttggccagggagctcaggtcactgttggtgggcatccac

SEQ ID NO: 11161 - DNA, 201 bp, Homo sapiens
gggaaggagggttgagtgccctggcagttgtgttcaggagcccagggcacagctgtccttgcctggagtctctccactccatttcctgctctttgggccamcagctaacttcagaagaaaactgggaggtagaattggattaaaggggcttgggggttccaaaatgacaactgcatacgtaggtggcctcacacctgctct

SEQ ID NO: 11162 - DNA, 201 bp, Homo sapiens
ccaggacagtacctaaatacatatttacatatttcaatgatagtatctgtctgatcccccattctaaaaacctgatgttaaaggaaacgaacctagtttgrcataactttataagtcacatgatatggtggaaagagggttgatttgggggatttggtcaggcctagattcaagctctgccacttagctatatggcctttg

SEQ ID NO: 11163 - DNA, 201 bp, Homo sapiens
ggcacagattctaacagatagcgcccaggttggaggcaaagcacatgttttcaagctctgtcatagctgcctctccttatctctcccttgtgcataatgartctacagaggaaccctgccacttgcctccaagatggaagtgggccaagctgccagaggctgttctaccagcatgattttacctccagtgctccacgttct

SEQ ID NO: 11164 - DNA, 201 bp, Homo sapiens
tgaatagtgttgcgatgaacataacccgtgcatatgtctttataatagagctgtttataaggaattctttctttagtgatccaaagcaccatttttttccrcaagaattaagcacaagtttagctgttagtctgaacttttaacttaggttaaactaacacaaacagaagatatcccaggatgtcagtgatattcgcagtg

SEQ ID NO: 11165 - DNA, 201 bp, Homo sapiens
ttccgcaagaattaagcacaagtttagctgttagtctgaacttttaacttaggttaaactaacacaaacagaagatatcccaggatgtcagtgatattcgyagtgtagaccaagaaaatggtttaagccagcatctctatggctaagagtttctatctggatagggaacaaccagatgtccacataggagggtctccccaa

SEQ ID NO: 11166 - DNA, 201 bp, Homo sapiens
aagaggggatgattgaggagatgctttgggaagttgaatcagtgcagtttgccagtggattggagatgaaaggaggagggagaaggtctagcagagagccscataagtctttgtcaaatgaaagaacaaatgatttaatgaaaaggaaggttcaaagaggactggggctttgtcctgagggtctggtctatgccacactct

SEQ ID NO: 11167 - DNA, 201 bp, Homo sapiens
gaggacgttgctggtggaggagaatgagaggtggaaaaggggctggctctcctgagcacgtgggcgtggtccactgagagtctaaggagagaaagaaaccrattcttcaccttagagggaggagacttggaaaggagccgagcatgggtgagcactcaaagattcaggctggctgtgtgatcgatgctaggaccatgcagg

SEQ ID NO: 11168 - DNA, 201 bp, Homo sapiens
gagcaaagtcaggggattgtatgtaagttctctattttctatgcagtacattttgtatttttcaaattataaatgtaataaatgcttattgtaaacaattkaagtgcagggaagtagaaagaaaaaaaacgcccatcgccaaatgccatctgacctcatttccttctactccttcttttctatgcacatttagatacttgt

SEQ ID NO: 11169 - DNA, 201 bp, Homo sapiens
ctcatcttgacctccaggacagtacctaaatacatatttacatatttcaatgatagtatctgtctgatcccccattctaaaaacctgatgttaaaggaaaygaacctagtttggcataactttataagtcacatgatatggtggaaagagggttgatttgggggatttggtcaggcctagattcaagctctgccacttagc

SEQ ID NO: 11170 - DNA, 201 bp, Homo sapiens
tcccctaaggttttttgttagagccaaactagaatggagtgctggtgggggaagaaagaggcgtctgagatagtaacagccaaggtccgggagggcgttcrcatgacgagacctcttctcagcagggatcacctgggggagaaagagccacccctttctggaaacacataagaatatgcatctgtcccttcacctgccatt

SEQ ID NO: 11171 - DNA, 201 bp, Homo sapiens
agatattccagttatttgctatacatttatagaaactttaatttccacttccatgccactggaaaaatataagactccaatgtacccagggtgtatccagrgatctgtcatcctctaagtgggcctattagtaaaaaaaaaaaaaaaaaaaaaaaaaaaaatcagaaaatgttatttattgatcttcgtggtggatctgct

SEQ ID NO: 11172 - DNA, 201 bp, Homo sapiens
attctaagaatgtattccaagtatataatcagaggtgtacatgatgacttacttatatccaacgatatttatcatagctttatttataataacaacaaacyaagaaggaaacacctgtatggaagttaagtaaaatcatagcgctgatatactgacgaaggcatttttaatactgtgttttgaaaaacatttaatgacagg

SEQ ID NO: 11173 - DNA, 201 bp, Homo sapiens; identical to SEQ ID NO: 5811

SEQ ID NO: 11174 - DNA, 201 bp, Homo sapiens; identical to SEQ ID NO: 5811

SEQ ID NO: 11175 - DNA, 201 bp, Homo sapiens; identical to SEQ ID NO: 5826

SEQ ID NO: 11176 - DNA, 201 bp, Homo sapiens; identical to SEQ ID NO: 5827

SEQ ID NO: 11177 - DNA, 201 bp, Homo sapiens; identical to SEQ ID NO: 5827

SEQ ID NO: 11178 - DNA, 201 bp, Homo sapiens; identical to SEQ ID NO: 5829

SEQ ID NO: 11179 - DNA, 201 bp, Homo sapiens; identical to SEQ ID NO: 5829

SEQ ID NO: 11180 - DNA, 201 bp, Homo sapiens; identical to SEQ ID NO: 5831

SEQ ID NO: 11181 - DNA, 201 bp, Homo sapiens; identical to SEQ ID NO: 5831

SEQ ID NO: 11182 - DNA, 201 bp, Homo sapiens
actcccaactgtatttttctctactcttctgaaattctagttcctcagctattgtggataatcctgccttttcacttctctgcatcttttaagcctatatrgatttccaccgaaagcccaaagttacttttttactgactttcctggtagaataacatgcagtaaaatcattatgattcctccccactcttcccactgcag

SEQ ID NO: 11183 - DNA, 201 bp, Homo sapiens
tagatcctaaaactcagaaggaacaatttggggataatttcttttctaactgctatatggataaaagcaccataggtcttctgaggggtagatatgaatgyacgagggtttaccagtatcctaagtgaaggtggttttgttgctgttgtttttgattatggtgaggatggtagactaactcctgtcattacatttgtcatt

SEQ ID NO: 11184 - DNA, 201 bp, Homo sapiens
gcaggggaactcccctttataaaaccatcagatctagtgagaattattcactatcatgagaacagtacaggagagctccgcccccatgattcaattacctsccactgggtccctcccacgacacgtgggaattatgggagctacaattcaagatgagatttgggtggggacacagccaaagcatatcactagttttccttt

SEQ ID NO: 11185 - DNA, 201 bp, Homo sapiens
ataatatatctatggcaggttaaaaaatattatataagtaatgtacaaataataaccagggcttgagaaataagatccagagcagtaattctcaccttttmatgtacataatgagtcagtgtgggttttattaaaatgaagattctggtttaggaagtccaggatgaggctgagattctgcttttctaacaagcttccagt

SEQ ID NO: 11186 - DNA, 201 bp, Homo sapiens
aggaaagaaagcgagaaagtgagagagggagggagagagagacagcgcgcacaaaagcgagcttctctgcactttattactttggatgagggacaagaacrttccatttgtttggtgcattgaatgtttgtcctgccaattaggtgtaatatccagtcaagctggcacttctagtgttttggaaccaggaagcatgattta

SEQ ID NO: 11187 - DNA, 201 bp, Homo sapiens; identical to SEQ ID NO: 5833

SEQ ID NO: 11188 - DNA, 201 bp, Homo sapiens; identical to SEQ ID NO: 5833

SEQ ID NO: 11189 - DNA, 201 bp, Homo sapiens; identical to SEQ ID NO: 5835

SEQ ID NO: 11190 - DNA, 201 bp, Homo sapiens; identical to SEQ ID NO: 5835

SEQ ID NO: 11191 - DNA, 201 bp, Homo sapiens
cttcagcttctttgaaattcttctgtactcatagtcattaatgcattgtttagcaattgttctgcttatgtgagttctgacttttaagctaagcctgaagkttagggttattacctcttatagattttgatacctaatatatcatgtattagtgtagctgctccacaaacaatgagctggtgaatagattgattacttact

SEQ ID NO: 11192 - DNA, 201 bp, Homo sapiens
cggtgtccacgcagagtgagtactgtcttccgccgctttgctccaggccgcgcgtgctcccgggtctagggcctgtgcccccggctacctgccctgcgtgyccggggcctggtccctgcagcggactccccaggctcgggacgtgcgcttttcctactatcgcgaccctggcgataccgtgcgttctgagtttaactgtgt

SEQ ID NO: 11193 - DNA, 201 bp, Homo sapiens; identical to SEQ ID NO: 5838

SEQ ID NO: 11194 - DNA, 201 bp, Homo sapiens
gccgggtgacaaggtgagcacacacaagcagacggaaacgtgggcctctgtgcttctcaagtttcttttatgagaaacgtatgctcaaataacctatcatytggcaaaactgaacactgcttatatgtaaaattttgtgaagagcatgcatttaagggatagagagtgaacaagataccaaaaataatttgtaaatttata

SEQ ID NO: 11195 - DNA, 201 bp, Homo sapiens; identical to SEQ ID NO: 5840

SEQ ID NO: 11196 - DNA, 201 bp, Homo sapiens; identical to SEQ ID NO: 5841

SEQ ID NO: 11197 - DNA, 201 bp, Homo sapiens; identical to SEQ ID NO: 5846

SEQ ID NO: 11198 - DNA, 201 bp, Homo sapiens; identical to SEQ ID NO: 5847

SEQ ID NO: 11199 - DNA, 201 bp, Homo sapiens; identical to SEQ ID NO: 5847

SEQ ID NO: 11200 - DNA, 201 bp, Homo sapiens; identical to SEQ ID NO: 5849

SEQ ID NO: 11201 - DNA, 201 bp, Homo sapiens; identical to SEQ ID NO: 5849

SEQ ID NO: 11202 - DNA, 201 bp, Homo sapiens; identical to SEQ ID NO: 5851

SEQ ID NO: 11203 - DNA, 201 bp, Homo sapiens; identical to SEQ ID NO: 5851

SEQ ID NO: 11204 - DNA, 201 bp, Homo sapiens; identical to SEQ ID NO: 5853

SEQ ID NO: 11205 - DNA, 201 bp, Homo sapiens; identical to SEQ ID NO: 5853

SEQ ID NO: 11206 - DNA, 201 bp, Homo sapiens
cttgatttttgagagccacctatgttggtgtgaattaccagcattctcaggaggaagattaaagtggtcgttttttaaaaaagggtatgcatttagccttyggggattaaagttactgtcatctgtgtcatcttcctttattaagcattattttttacttttttatagcatgtcagtgaaaaaaccagtgaatcgccttcc

SEQ ID NO: 11207 - DNA, 201 bp, Homo sapiens; identical to SEQ ID NO: 5855

SEQ ID NO: 11208 - DNA, 201 bp, Homo sapiens; identical to SEQ ID NO: 5855

SEQ ID NO: 11209 - DNA, 201 bp, Homo sapiens
ctgaaaacttgagcttaaaattcgtgaggcattttgcaggagacaagatgccgccttggcatcaccatcagctctgcatctagttaattacagactgaccktctagattccaaatgaatgtgtgtagcatcccttgatttttgagagccacctatgttggtgtgaattaccagcattctcaggaggaagattaaagtggtc

SEQ ID NO: 11210 - DNA, 201 bp, Homo sapiens
tgaatgagatgtctaccgtgctgaaaacttgagcttaaaattcgtgaggcattttgcaggagacaagatgccgccttggcatcaccatcagctctgcatcyagttaattacagactgaccttctagattccaaatgaatgtgtgtagcatcccttgatttttgagagccacctatgttggtgtgaattaccagcattctca

SEQ ID NO: 11211 - DNA, 201 bp, Homo sapiens
attgaatgtttgtcctgccaattaggtgtaatatccagtcaagctggcacttctagtgttttggaaccaggaagcatgatttaacattagattgctttccaaaaaaaaaaaaaaaaatcacacacaggagttttgttgacagtgagagccaaaatgtttatgtctcattgatttatggtgagaattaaaaaattaggtatg

SEQ ID NO: 11212 - DNA, 201 bp, Homo sapiens
ttgaatgtttgtcctgccaattaggtgtaatatccagtcaagctggcacttctagtgttttggaaccaggaagcatgatttaacattagattgctttccaaaaaaaaaaaaaaaaatcacacacaggagttttgttgacagtgagagccaaaatgtttatgtctcattgatttatggtgagaattaaaaaattaggtatgt

SEQ ID NO: 11213 - DNA, 201 bp, Homo sapiens
tgaatgtttgtcctgccaattaggtgtaatatccagtcaagctggcacttctagtgttttggaaccaggaagcatgatttaacattagattgctttccaaaaaaaaaaaaaaaaatcacacacaggagttttgttgacagtgagagccaaaatgtttatgtctcattgatttatggtgagaattaaaaaattaggtatgtc

SEQ ID NO: 11214 - DNA, 201 bp, Homo sapiens
gaatgtttgtcctgccaattaggtgtaatatccagtcaagctggcacttctagtgttttggaaccaggaagcatgatttaacattagattgctttccaaaaaaaaaaaaaaaaatcacacacaggagttttgttgacagtgagagccaaaatgtttatgtctcattgatttatggtgagaattaaaaaattaggtatgtct

SEQ ID NO: 11215 - DNA, 201 bp, Homo sapiens
aatgtttgtcctgccaattaggtgtaatatccagtcaagctggcacttctagtgttttggaaccaggaagcatgatttaacattagattgctttccaaaaaaaaaaaaaaaaatcacacacaggagttttgttgacagtgagagccaaaatgtttatgtctcattgatttatggtgagaattaaaaaattaggtatgtctt

SEQ ID NO: 11216 - DNA, 201 bp, Homo sapiens
gacctcttcatataccaatcattggtgtcaataattgtcaacattgtcctaatcttgttttatctgttaaccgtcacagctaccagcacagacacgcgtgcacacacacacacacacacacaccctttcaacatgttttaaagcatgggaattgcaaatataagtcatccttgtaaccaaattgctgtagtttgttgggaa

SEQ ID NO: 11217 - DNA, 201 bp, Homo sapiens
acctcttcatataccaatcattggtgtcaataattgtcaacattgtcctaatcttgttttatctgttaaccgtcacagctaccagcacagacacgcgtgcacacacacacacacacacacaccctttcaacatgttttaaagcatgggaattgcaaatataagtcatccttgtaaccaaattgctgtagtttgttgggaaa

SEQ ID NO: 11218 - DNA, 201 bp, Homo sapiens
gggaatggtattaaaaaaacaactgaacactttgcctctatgagagaatatataaatatatatatataaatatatcaacattatatcatacaataataatrtacccttcattatcttattttagatttatgagctgaattacctaagatcttaggtcccaccaaattgtctctgaaaagattatattttattgcttgtgga

SEQ ID NO: 11219 - DNA, 201 bp, Homo sapiens
cttgctgtggtacagtgttaaaaaattatggaaaaatatatttcttggctcagcagtgatcacacattgttgattttttctttctgaatgagtacatgttrggatgtgtgtgtgttttgagaaaatgtttggtcttgactttatatataaattttctttgaataataaaaactcaccaacaattttgaaaatgttagaaat

SEQ ID NO: 11220 - DNA, 201 bp, Homo sapiens
gaatgcaatggtgtgatcttggctcactgcaacctccatctcccaggttcaggcgattctcctacctcagcctcccaagtagctggggttacagacatgckccattacacccagctaatttttatttttagtagagatggggtttcactatgttggccaggctggtctcgaactcctgacctcaggtgatccgcctgcctc

SEQ ID NO: 11221 - DNA, 201 bp, Homo sapiens
atgtaagtttgcatttgactacattggtaaggtgttttcccccattgaaactaatattttctattttcaagaaaaaagcagcaagcctcggcagcagtcartcctccagaacctatgctggtggaacagcctcggccaccaaggtcagtgatttcctgaacacgaaaagacccctactgtattctacagggatatgattag

SEQ ID NO: 11222 - DNA, 201 bp, Homo sapiens
aggatcacttgagcccaggagttcatgaccagcttgagcaacatagtaagaccctttctctcctaaaaaaaaaaaaattaaaaattagccaggcttggtgrtgcgtgcctatagtcccagctactcagatggctgaggttggaggatcacttaagtctgggaggtcgaggctgcagtgagctgtgacagtgccactgcact

SEQ ID NO: 11223 - DNA, 201 bp, Homo sapiens
tgcggaaattatacggactcttactaaagcctatatgaaaatagttgtgatccataaccagtcatgcaattttatttctggaagacttgtcagacaacttytatttcaccaacctgactgttcaggtgaggaaaccgaggttcaaattgcattaggaatgtctctgtagaagaccatgctattaagaagatgtactggtta

SEQ ID NO: 11224 - DNA, 201 bp, Homo sapiens
atggccacagcacagcagtggaactacattgtttgccttcactctaaggaaaggagcctttttccacctgacttacagcagaagaatcttgcgaaaaaaawttttttttttttttgagacagggtctcactattgcccaggcaggagtgcagtggtgtgatctcagctcactgcaacctccaccttccaggttcaagcgat

SEQ ID NO: 11225 - DNA, 201 bp, Homo sapiens
tggcccgagacaagtggcccgagacaagtggcccaaaagaaggaaagcagcagctatgtcagtttggtttggcacctttatctctagggttggagatagayctcctcctccccagccgtgccgccaccctgtgatgacctccgttttagagcgtgagctcactctgacctttctgcgtacctgatacatgctgggtgtggc

SEQ ID NO: 11226 - DNA, 201 bp, Homo sapiens
catgcccggctaattgtttttttgtttgtttgtttgtttgtttgtttttgtagagacagggtctcactgtgttgcccaagctggtctcaaattcctgggcygaagcagtccttccacctgggcctcccaaagtgctgggattacaggaatgagccaccgtgcccgtggccagttttgtttttgtttttgatcctagatttg

SEQ ID NO: 11227 - DNA, 201 bp, Homo sapiens
caggcatgagccactgtgtccagcctaaaattaaaaatcctaattttaaaaaatattccagaagcatctacaaaataaaagttctcattaagaccaggcayagtggcccacacctataatcccagcattttgagaggtcaaggtgggaggatcgcttgagcccaggagtttgggaccagcctgggcaacatagcgagatcc

SEQ ID NO: 11228 - DNA, 201 bp, Homo sapiens
ggagatcaaggctgcagcaagctgtgattgcaccactgcactccagcccaggtgacagagcaagaccctgtctcaaaaataaataaataaataaataaataaataatctcattgaatttagagatcatgaaaaccaaagaaaagagataggaaagagagccagaaatataggatttcctttttattcttttggttcttttt

SEQ ID NO: 11229 - DNA, 201 bp, Homo sapiens
gagatcaaggctgcagcaagctgtgattgcaccactgcactccagcccaggtgacagagcaagaccctgtctcaaaaataaataaataaataaataaataaataatctcattgaatttagagatcatgaaaaccaaagaaaagagataggaaagagagccagaaatataggatttcctttttattcttttggttctttttc

SEQ ID NO: 11230 - DNA, 201 bp, Homo sapiens
agatcaaggctgcagcaagctgtgattgcaccactgcactccagcccaggtgacagagcaagaccctgtctcaaaaataaataaataaataaataaataaataatctcattgaatttagagatcatgaaaaccaaagaaaagagataggaaagagagccagaaatataggatttcctttttattcttttggttctttttca

SEQ ID NO: 11231 - DNA, 201 bp, Homo sapiens
gatcaaggctgcagcaagctgtgattgcaccactgcactccagcccaggtgacagagcaagaccctgtctcaaaaataaataaataaataaataaataaataatctcattgaatttagagatcatgaaaaccaaagaaaagagataggaaagagagccagaaatataggatttcctttttattcttttggttctttttcat

SEQ ID NO: 11232 - DNA, 201 bp, Homo sapiens
aaaggagtttttttttttttttgcttttgagacggagtctcgctctgtcgcccaggctggagtgcagtggcgccatcttggctcactgcaagctccgcctyccgggttcacgccattctccttcctccgcctcccgagtagctgggactacaggcacccgccaccaagcctggctcatttttttgtatttttagtagagac

SEQ ID NO: 11233 - DNA, 201 bp, Homo sapiens
agctgcttccaatacttgcccaggaatataagatgagaagttatctaccttttctacccatagcaatatagaatttttttttttaccttatcctttaaggtttttttttttttttttgcatttatttatttatttattttcattatactttaagttttagggtacatgtgcacattgtgcaggttagttacatatgtatac

SEQ ID NO: 11234 - DNA, 201 bp, Homo sapiens
gctgcttccaatacttgcccaggaatataagatgagaagttatctaccttttctacccatagcaatatagaatttttttttttaccttatcctttaaggtttttttttttttttttgcatttatttatttatttattttcattatactttaagttttagggtacatgtgcacattgtgcaggttagttacatatgtataca

SEQ ID NO: 11235 - DNA, 201 bp, Homo sapiens
tcccaatgctatccctcccccctctccccacccctccacagtcccccgagtgtgatattccccttcctgtgtccatgtgatctcattgttcaattcccacstatgagtgagaatatgcggtgtttggtttttcgttcttgcgatagtttactgagaatgatgatttccaatttcatccatgtccctacaaaggacatgaac

SEQ ID NO: 11236 - DNA, 201 bp, Homo sapiens
gctatccctcccccctctccccacccctccacagtcccccgagtgtgatattccccttcctgtgtccatgtgatctcattgttcaattcccacgtatgagygagaatatgcggtgtttggtttttcgttcttgcgatagtttactgagaatgatgatttccaatttcatccatgtccctacaaaggacatgaactcatcat

SEQ ID NO: 11237 - DNA, 201 bp, Homo sapiens
gtcccccgagtgtgatattccccttcctgtgtccatgtgatctcattgttcaattcccacgtatgagtgagaatatgcggtgtttggtttttcgttcttgygatagtttactgagaatgatgatttccaatttcatccatgtccctacaaaggacatgaactcatcattttttatggctgcatagtattccatggtgtata

SEQ ID NO: 11238 - DNA, 201 bp, Homo sapiens
ccatgtgatctcattgttcaattcccacgtatgagtgagaatatgcggtgtttggtttttcgttcttgcgatagtttactgagaatgatgatttccaattycatccatgtccctacaaaggacatgaactcatcattttttatggctgcatagtattccatggtgtatatgtgccacattttcttaatccactctgtcatt

SEQ ID NO: 11239 - DNA, 201 bp, Homo sapiens
tgtgtctttatagcagcatgatttatagtccttttggtatatacccagtaatgggatggctaggtcaaatggtatttctagttctagatccctgaggaatygccacactgacttccacaagggttgaactagtttacagtcccaccaacagtgtaaaagtgttcctatttctccacatcctctccagcacctgttgtttcc

SEQ ID NO: 11240 - DNA, 201 bp, Homo sapiens
atttatagtccttttggtatatacccagtaatgggatggctaggtcaaatggtatttctagttctagatccctgaggaatcgccacactgacttccacaakggttgaactagtttacagtcccaccaacagtgtaaaagtgttcctatttctccacatcctctccagcacctgttgtttcctgacttttgaatgattgcca

SEQ ID NO: 11241 - DNA, 201 bp, Homo sapiens
aattttctcccattttgtaggttgcctgttcactctgatggtagtttcttttgctgtgcagaagctctttagtttaattagatcccatttgtcaattttgkcttttgttgccattgcttttggtgttttggacatgaagtccttgcccatgcctatgtcctgaatggtaatgcctaggttttcttctagggtttttatggt

SEQ ID NO: 11242 - DNA, 201 bp, Homo sapiens
ttctcccattaaataggatttaatgacttgccttcttattttagtacatagcatgtttaaagtaccataaggcaggcagatcacctgaggtcaggagctcragaccagcctgaccaacatggagaaaccccgtctctactaaaaataaaaaattagctgggcatggtggcacaggcctgtaatcccagctactcaagaggc

SEQ ID NO: 11243 - DNA, 201 bp, Homo sapiens
tgttaatttctcaattctcaccagaaaaaagaaaagaaatcattaaccccagctgtgccagttgaatctaaaccggataaaccatcgggaaaggtatgaakacaacagtgtccttctacatgagacagttactcatatgctctgtatttatcataatctgatttcttgtgggcaaataatatgaggggggtaatttaaagg

SEQ ID NO: 11244 - DNA, 201 bp, Homo sapiens
tttaatgaattattgtttcaagctaatattgaaagtgtgggttggaagtatggttttcacactcatgtttgtaacacttgctattataaccccttttttaaaaaaaaacaaacaaactccagtttcatcccatggagtttacattccagtttctctcctgcaaatacactttatttaaccagaggtattactaaagaagta

SEQ ID NO: 11245 - DNA, 201 bp, Homo sapiens
ttaatgaattattgtttcaagctaatattgaaagtgtgggttggaagtatggttttcacactcatgtttgtaacacttgctattataaccccttttttaaaaaaaaacaaacaaactccagtttcatcccatggagtttacattccagtttctctcctgcaaatacactttatttaaccagaggtattactaaagaagtaa

SEQ ID NO: 11246 - DNA, 201 bp, Homo sapiens
taatgaattattgtttcaagctaatattgaaagtgtgggttggaagtatggttttcacactcatgtttgtaacacttgctattataaccccttttttaaaaaaaaacaaacaaactccagtttcatcccatggagtttacattccagtttctctcctgcaaatacactttatttaaccagaggtattactaaagaagtaag

SEQ ID NO: 11247 - DNA, 201 bp, Homo sapiens
attattgtttcaagctaatattgaaagtgtgggttggaagtatggttttcacactcatgtttgtaacacttgctattataaccccttttttaaaaaaaaacaaacaaactccagtttcatcccatggagtttacattccagtttctctcctgcaaatacactttatttaaccagaggtattactaaagaagtaaggtactt

SEQ ID NO: 11248 - DNA, 201 bp, Homo sapiens
aagcccatattggcagagtaaacttgtgagttcttgtaagtttaatgtctcaggtaatttctgttttgtaaacctcttcaggcaagcaagtgaacaacaamaaaaaaaaacatgaatgaaataatacagagtgatttccctcatgaaatagattctatttggaataggtactatatagagatttttaggggttctttgttt

SEQ ID NO: 11249 - DNA, 201 bp, Homo sapiens
ctacttgggaagctgaggcaggagaatcacttgaacccaggaggcagaggttgcagcgagctgagatcgcaccactgcactccagtttgggcgacagagcragactccatctcaaaaaaaagagtatctagtgttctgtcatttgcatagaaacaggatgatgtcagtatcaacatcaacacagcaactaaaaattagtat

SEQ ID NO: 11250 - DNA, 201 bp, Homo sapiens
tattaaaaaaaagacatgccagccaggcatggtggctcacacctgtaatcccagcactttgggaggccgaggcaggcggatcatctgaggtcaggagttcragaccagcctagccaacatggtgaaaccctgtctctactaaaaatacaaaaaaattagtcaggaatgttggcgcatggctgtaatcccagctactcagga

SEQ ID NO: 11251 - DNA, 201 bp, Homo sapiens
ctcctgcatatttatagaataatgctgatgagtgtttatcccgccacactccaagatcttaacaagccttctgaaccaaaacaagcttacatctggtgtasgaaagttttaatattaaattataatttttgtggaatttttcaactcagtcctctggggtgaaagaggaaggaaaggagagagttgccggttcctgacaag

SEQ ID NO: 11252 - DNA, 201 bp, Homo sapiens
acttccagcaacaatccttgagtctgggactgccctggcctaagatgggccagtttctatcttcgactttcttggagggctcaccggccacagtgtggcaygataagctttgtgacggtgaacgcagaggagcaagagaagcagttcgtatcttccaggaccaagtaatgtattgggaagaagggaaacttgattacaaca

SEQ ID NO: 11253 - DNA, 201 bp, Homo sapiens
ctggtccattaaaagtgctcaataagtagtaattaatcaactaaccaatcagtgggtttagttacatttaatgtttaaatgttttcatttgttttgttttktatatttcctgtaaaacatgaccagctgactttctctattattgtgcgtatcctgtttaaatgttactaattacaattgtttaagaaccacactcttagg

SEQ ID NO: 11254 - DNA, 201 bp, Homo sapiens
catataaatctctagttttgaggtttgtgatcttaaaaaaaaattgtgagacagactgttttagcatcaagcagtctgttagaaagcccaatatgccatcrttttttccatgtcatttttgtcttcctttttggatgtgctttctgccccaacctaaccctgatattcttgcaattgaagtcctgcaatgactccttcgga

SEQ ID NO: 11255 - DNA, 201 bp, Homo sapiens
catatcctattaatgaccatctgctgagcaccttgcatataggataggcttccataaaagtctagatttaaaacaatttgtttaaaggtttgcttctgttytttttgtttgtttgttttgttttgttttttcttgagatagggtctcactctctctcccagctgggagtgtagtggcacagtcttggctcactccagcctc

SEQ ID NO: 11256 - DNA, 201 bp, Homo sapiens
tcactccagcctcaatcttccaggcccaagcaattctctcgcctcagcctcctgagtagctgagactacaggtgcatgccaccatgcctggctaatttttrtattttctgcagagctggggtttggccatgttgcccaggctgattcaaactcctggactccagtgatccaccctccttggcctcccaaagtgctgggatc

SEQ ID NO: 11257 - DNA, 201 bp, Homo sapiens
aacagtgggaaattcattgatattgcaaccccatccccatacactggaagcaacagtttaaagaatagtatttatcccttctatgtatgatgcattttatmcacacacacacacacacacacacacacactcttacatttttttttttttgaggcagagtctcgttctgtcatccaggttggactgcaatggcatgatctc

SEQ ID NO: 11258 - DNA, 201 bp, Homo sapiens
acagtgggaaattcattgatattgcaaccccatccccatacactggaagcaacagtttaaagaatagtatttatcccttctatgtatgatgcattttatacacacacacacacacacacacacacacactcttacatttttttttttttgaggcagagtctcgttctgtcatccaggttggactgcaatggcatgatctcg

SEQ ID NO: 11259 - DNA, 201 bp, Homo sapiens; identical to SEQ ID NO: 5857

SEQ ID NO: 11260 - DNA, 201 bp, Homo sapiens; identical to SEQ ID NO: 5858

SEQ ID NO: 11261 - DNA, 201 bp, Homo sapiens; identical to SEQ ID NO: 5859

SEQ ID NO: 11262 - DNA, 201 bp, Homo sapiens; identical to SEQ ID NO: 5860

SEQ ID NO: 11263 - DNA, 201 bp, Homo sapiens; identical to SEQ ID NO: 5861

SEQ ID NO: 11264 - DNA, 201 bp, Homo sapiens; identical to SEQ ID NO: 5862

SEQ ID NO: 11265 - DNA, 201 bp, Homo sapiens; identical to SEQ ID NO: 5862

SEQ ID NO: 11266 - DNA, 201 bp, Homo sapiens; identical to SEQ ID NO: 5864

SEQ ID NO: 11267 - DNA, 201 bp, Homo sapiens; identical to SEQ ID NO: 5864

SEQ ID NO: 11268 - DNA, 201 bp, Homo sapiens; identical to SEQ ID NO: 5866

SEQ ID NO: 11269 - DNA, 201 bp, Homo sapiens; identical to SEQ ID NO: 5866

SEQ ID NO: 11270 - DNA, 201 bp, Homo sapiens; identical to SEQ ID NO: 5868

SEQ ID NO: 11271 - DNA, 201 bp, Homo sapiens; identical to SEQ ID NO: 5868

SEQ ID NO: 11272 - DNA, 201 bp, Homo sapiens; identical to SEQ ID NO: 5870

SEQ ID NO: 11273 - DNA, 201 bp, Homo sapiens; identical to SEQ ID NO: 5870

SEQ ID NO: 11274 - DNA, 201 bp, Homo sapiens; identical to SEQ ID NO: 5872

SEQ ID NO: 11275 - DNA, 201 bp, Homo sapiens; identical to SEQ ID NO: 5872

SEQ ID NO: 11276 - DNA, 201 bp, Homo sapiens; identical to SEQ ID NO: 5874

SEQ ID NO: 11277 - DNA, 201 bp, Homo sapiens; identical to SEQ ID NO: 5874

SEQ ID NO: 11278 - DNA, 201 bp, Homo sapiens; identical to SEQ ID NO: 1079

SEQ ID NO: 11279 - DNA, 201 bp, Homo sapiens; identical to SEQ ID NO: 1079

SEQ ID NO: 11280 - DNA, 201 bp, Homo sapiens; identical to SEQ ID NO: 1080

SEQ ID NO: 11281 - DNA, 201 bp, Homo sapiens; identical to SEQ ID NO: 1080

SEQ ID NO: 11282 - DNA, 201 bp, Homo sapiens; identical to SEQ ID NO: 1082

SEQ ID NO: 11283 - DNA, 201 bp, Homo sapiens; identical to SEQ ID NO: 1082

SEQ ID NO: 11284 - DNA, 201 bp, Homo sapiens; identical to SEQ ID NO: 5882

SEQ ID NO: 11285 - DNA, 201 bp, Homo sapiens; identical to SEQ ID NO: 5882

SEQ ID NO: 11286 - DNA, 201 bp, Homo sapiens; identical to SEQ ID NO: 5884

SEQ ID NO: 11287 - DNA, 201 bp, Homo sapiens; identical to SEQ ID NO: 5884

SEQ ID NO: 11288 - DNA, 201 bp, Homo sapiens; identical to SEQ ID NO: 5886

SEQ ID NO: 11289 - DNA, 201 bp, Homo sapiens; identical to SEQ ID NO: 5886

SEQ ID NO: 11290 - DNA, 201 bp, Homo sapiens; identical to SEQ ID NO: 5888

SEQ ID NO: 11291 - DNA, 201 bp, Homo sapiens; identical to SEQ ID NO: 5888

SEQ ID NO: 11292 - DNA, 201 bp, Homo sapiens; identical to SEQ ID NO: 5890

SEQ ID NO: 11293 - DNA, 201 bp, Homo sapiens; identical to SEQ ID NO: 5890

SEQ ID NO: 11294 - DNA, 201 bp, Homo sapiens; identical to SEQ ID NO: 5892

SEQ ID NO: 11295 - DNA, 201 bp, Homo sapiens; identical to SEQ ID NO: 5892

SEQ ID NO: 11296 - DNA, 201 bp, Homo sapiens; identical to SEQ ID NO: 5894

SEQ ID NO: 11297 - DNA, 201 bp, Homo sapiens; identical to SEQ ID NO: 5894

SEQ ID NO: 11298 - DNA, 201 bp, Homo sapiens; identical to SEQ ID NO: 5896

SEQ ID NO: 11299 - DNA, 201 bp, Homo sapiens; identical to SEQ ID NO: 5896

SEQ ID NO: 11300 - DNA, 201 bp, Homo sapiens; identical to SEQ ID NO: 5898

SEQ ID NO: 11301 - DNA, 201 bp, Homo sapiens; identical to SEQ ID NO: 5898

SEQ ID NO: 11302 - DNA, 201 bp, Homo sapiens; identical to SEQ ID NO: 5900

SEQ ID NO: 11303 - DNA, 201 bp, Homo sapiens; identical to SEQ ID NO: 5900

SEQ ID NO: 11304 - DNA, 201 bp, Homo sapiens; identical to SEQ ID NO: 5902

SEQ ID NO: 11305 - DNA, 201 bp, Homo sapiens; identical to SEQ ID NO: 5902

SEQ ID NO: 11306 - DNA, 201 bp, Homo sapiens; identical to SEQ ID NO: 5904

SEQ ID NO: 11307 - DNA, 201 bp, Homo sapiens; identical to SEQ ID NO: 5904

SEQ ID NO: 11308 - DNA, 201 bp, Homo sapiens; identical to SEQ ID NO: 5906

SEQ ID NO: 11309 - DNA, 201 bp, Homo sapiens; identical to SEQ ID NO: 5906

SEQ ID NO: 11310 - DNA, 201 bp, Homo sapiens; identical to SEQ ID NO: 5908

SEQ ID NO: 11311 - DNA, 201 bp, Homo sapiens; identical to SEQ ID NO: 5908

SEQ ID NO: 11312 - DNA, 201 bp, Homo sapiens; identical to SEQ ID NO: 5910

SEQ ID NO: 11313 - DNA, 201 bp, Homo sapiens; identical to SEQ ID NO: 5910

SEQ ID NO: 11314 - DNA, 201 bp, Homo sapiens; identical to SEQ ID NO: 5912

SEQ ID NO: 11315 - DNA, 201 bp, Homo sapiens; identical to SEQ ID NO: 5912

SEQ ID NO: 11316 - DNA, 201 bp, Homo sapiens; identical to SEQ ID NO: 5914

SEQ ID NO: 11317 - DNA, 201 bp, Homo sapiens; identical to SEQ ID NO: 5915

SEQ ID NO: 11318 - DNA, 201 bp, Homo sapiens; identical to SEQ ID NO: 5916

SEQ ID NO: 11319 - DNA, 201 bp, Homo sapiens; identical to SEQ ID NO: 5917

SEQ ID NO: 11320 - DNA, 201 bp, Homo sapiens; identical to SEQ ID NO: 5918

SEQ ID NO: 11321 - DNA, 201 bp, Homo sapiens; identical to SEQ ID NO: 5919

SEQ ID NO: 11322 - DNA, 201 bp, Homo sapiens; identical to SEQ ID NO: 5920

SEQ ID NO: 11323 - DNA, 201 bp, Homo sapiens; identical to SEQ ID NO: 5921

SEQ ID NO: 11324 - DNA, 201 bp, Homo sapiens; identical to SEQ ID NO: 5922

SEQ ID NO: 11325 - DNA, 201 bp, Homo sapiens; identical to SEQ ID NO: 5923

SEQ ID NO: 11326 - DNA, 201 bp, Homo sapiens; identical to SEQ ID NO: 5924

SEQ ID NO: 11327 - DNA, 201 bp, Homo sapiens; identical to SEQ ID NO: 5925

SEQ ID NO: 11328 - DNA, 201 bp, Homo sapiens; identical to SEQ ID NO: 5926

SEQ ID NO: 11329 - DNA, 201 bp, Homo sapiens; identical to SEQ ID NO: 5959

SEQ ID NO: 11330 - DNA, 201 bp, Homo sapiens; identical to SEQ ID NO: 5959

SEQ ID NO: 11331 - DNA, 201 bp, Homo sapiens; identical to SEQ ID NO: 5961

SEQ ID NO: 11332 - DNA, 201 bp, Homo sapiens; identical to SEQ ID NO: 5961

SEQ ID NO: 11333 - DNA, 201 bp, Homo sapiens; identical to SEQ ID NO: 5963

SEQ ID NO: 11334 - DNA, 201 bp, Homo sapiens; identical to SEQ ID NO: 5963

SEQ ID NO: 11335 - DNA, 201 bp, Homo sapiens; identical to SEQ ID NO: 5965

SEQ ID NO: 11336 - DNA, 201 bp, Homo sapiens; identical to SEQ ID NO: 5965

SEQ ID NO: 11337 - DNA, 201 bp, Homo sapiens; identical to SEQ ID NO: 5968

SEQ ID NO: 11338 - DNA, 201 bp, Homo sapiens; identical to SEQ ID NO: 5968

SEQ ID NO: 11339 - DNA, 201 bp, Homo sapiens; identical to SEQ ID NO: 5970

SEQ ID NO: 11340 - DNA, 201 bp, Homo sapiens
cagcctgagattagtggggaggaccgtcttaatacaggtgaccctggatgttcatgaaggccgctgtgccttgacctggggagtgctgctccatgacaggrtttctccagatgccgaaatagagcgtgactggaaatgtttaaaagaaaaccatgacttcatcctttaatgagagcttctctataaaacagtgaaactaat

SEQ ID NO: 11341 - DNA, 201 bp, Homo sapiens
tctgtcttgattgacctttctttctaatgctagatcaactaaagtcttactcatcttttcaaggctctgctgaaatatggctttatctgctgcttttccckccctaagctatatccatccaacctttattaagcagaacacaacatggcagaggatctgtagttctttttttatatatcactattaaagcctttgttacaa

SEQ ID NO: 11342 - DNA, 201 bp, Homo sapiens
tacattggtcctttgtggactaagtaatccaggcagctctgagagcaagccagtctttaggggaacagatcatacccacaagaaagttgagggagcctccrttaagttaaaaaacatttcgtttattagtaagtcattttcagcatataaattaagtttaaacagtcattatttttaacttaatagtttcatcacagccaa

SEQ ID NO: 11343 - DNA, 201 bp, Homo sapiens
tcacgttacggtttttagcacccagaaagttttttcctctatcttcatcttaatttcattactcagtccccacctcccaatgaggaaagaaaacctgcccrtttgggtcagttcaagtcaggtctaccattggtccagtcaactgtgggctgtggagaagagggatagagcaatggggagccatgatgggatctggaattc

SEQ ID NO: 11344 - DNA, 201 bp, Homo sapiens
tgtggcagagttgaaccttgccctggcagaagcccttagctgggtgagagctcaggctctgagccttattgcacttagctcttattgatttttttcagatktatgggtttgctatggcagattttaaacgtatagaggctgtcacctagaatgaggacaaacgacagttgtagttgccaactatgtgataaagggggtgaa

SEQ ID NO: 11345 - DNA, 201 bp, Homo sapiens
aactcatccagccttacttcaggtgaatcccaggagctaatctatgacaggcaatagatgccacctctgaaaattggacacaaagggcctgtacctttacrgtgtcatcttgtcatgtccactgaaatcttaaaatgttagaaaaaacgaacacttggggttcagtgaaaacagagggatttcagaattacagctatgcag

SEQ ID NO: 11346 - DNA, 201 bp, Homo sapiens
aatgaaccaggtgcctcactaatgtcaactcttttcataaatttgccagcccctgggatagataccattagccctattttacaaaaagaaactgaaaaatyaaattatctgcccaaggtcacggtcatatagccttacaaatctaggctgtttctgccctatcagagtttattgcagtcaactaacagacagaaatgactc

SEQ ID NO: 11347 - DNA, 201 bp, Homo sapiens
ctatcatggtgcccataaatcttcccccaaaaccagtggttctcaatcctggctgtatattggaatcatctggggaactttagaaaaatttatccatggcmaggccccattctattcaaactaaatctaaatccctgtgccctgacacaaatgtttctaaaagcttcccaggtgcttgtgacaggcactgaaggatgggac

SEQ ID NO: 11348 - DNA, 201 bp, Homo sapiens
atgatatgtatttgccacatgagcagaaagcagagtgagactctgtggagagcatggaaccttgtaccagacaagaacaagtcaccttttaaagtttctcwtttgtgaaatggaataattacacctcctgacaagtaaatgaggcactcaaaatagtaaacacccaataaaacagtggctattattattacttatgtaatc

SEQ ID NO: 11349 - DNA, 201 bp, Homo sapiens
ttgtctttctctataagtcttcataatgttggtcactgcttgttttcctatgagcaaaacttatttacatagatattagaattattttcctatgtggaatrtgtcagataggttttcatgagcactgcatgaatttaagttcaaagctacaattaaaactcctggcattatgtagacattaaagcaatctatttatcctaa

SEQ ID NO: 11350 - DNA, 201 bp, Homo sapiens
atgtgtcagataggttttcatgagcactgcatgaatttaagttcaaagctacaattaaaactcctggcattatgtagacattaaagcaatctatttatccyaagatacaaattcagtttgaattctgagagaaatttagaaaatttacaaaatttaggacaaaaactctgtgccattctgagaccacagtgagagcatctt

SEQ ID NO: 11351 - DNA, 201 bp, Homo sapiens
cgaactcctgacctcaggtgatccgcctgcctctgcctgccaaagtgctaggattacaggcataaaccactgcacctggcctcagtatgtgaatttctatrtaatattatgagttaatggtaaggcttattcattatgacttagtgttttttagagccagcatattgtatttactgctttgcacttgcagtagcacacatt

SEQ ID NO: 11352 - DNA, 201 bp, Homo sapiens
attgtagctaagatcaaaagctaatagctggagtttgggacagctgtgtcacattgaaaacagacctaacctccttcagtttcctcgctggaaaatgagakgttgagataggtaatgaagttgaaatggataatgctactgctgtattcttgtctttatgtcttacgtccagtcttttacacagaatccatttgtacatta

SEQ ID NO: 11353 - DNA, 201 bp, Homo sapiens
tctttattcccattgtacagcttcagaaaatgaggcagagagtttagacagcttccctaaggatcgggactttggggcctctctagttttctaggaaaccmcctatgcatcagaatgacagaaatgcttaatcagcagctctggaaagttcctgctgtttcacatgtttttcagaggaaaaacctctgcattgcagggaag

SEQ ID NO: 11354 - DNA, 201 bp, Homo sapiens
atatttgtaacaatgactctcccgcatgctattttacttcctgattaggttgggaaaatgtggcttgaaattcaccttcaatgaagattgttttccatgaragtcctttttcccctatgttgtagatctgcctctaccaagtggtttttagtacgttgctgcctgtggtcattcagatttcaacagcgttaatatcttggc

SEQ ID NO: 11355 - DNA, 201 bp, Homo sapiens
cattatttaatgcccttcactaaagtatagcatataatattagaactgcagaactacaggattctcaaggccaacagtttttacaaataaagaaaaggtgygcaagaaagattaagagctccaagtcacatggctagtcaagtacagtcttcctcatggctcctgtagtgcctgttaacagaaattgtttgattcacaggc

SEQ ID NO: 11356 - DNA, 201 bp, Homo sapiens
aggaagagcctagatgagacataatgcagtagaattccctctgtaaccttgtctccaccttctctttcttacatgacactgaacggacagttcacatccayccaagtctatttacgggagttttgtccttctatcttatgtattaggaataacacactggcaatttaatgagcatctgcaatttgccagacattttgccac

SEQ ID NO: 11357 - DNA, 201 bp, Homo sapiens
tttgaaaatattattcagatgaaatactgaatttttcattattctgataatcaccattctcagagactgctgacagggttactattgacctgataccacakgtctacttctgtgatcctaaagagtgggcctgagtgggcctaagcgggcttttcctgaaaaaggcagaatgttttagttggaattttgttcttgttcttg

SEQ ID NO: 11358 - DNA, 201 bp, Homo sapiens
gtagaatatgataccatttatataacattggaaaatatgcaaagtaatgctggacgttgtttatggttacctacatatgtaaaaaatgttctaaaataacyttaaattgatatgctaaagttcagaatggtggctatttctgattaacagggaaagggaattaggtttgagaatgctaaacaggagacatccactctatga

SEQ ID NO: 11359 - DNA, 201 bp, Homo sapiens
tcccctttttataaggacgcgcatcatattggagtagggcccaccctaatgacctcacctttacttgattctataaggaacctatctcaaaatcaggtctygttttgaggtactggggttaagacttgaacatatagatctggggtgggaggcacaattcaacccacaacgggcaatacattttgccgatcttaaggatta

SEQ ID NO: 11360 - DNA, 201 bp, Homo sapiens
ttttgccgatcttaaggattaattctaccttctcaacatcatcaaattaatatttgtttcagaaaaaggaagggatcacagggcctcctgcagactcttcrgtgagtttacatacatgtcttctgatctaaattaatagttttatatttttggctgggggaacagggctatcaattctatatttgaggattatgacttaac

SEQ ID NO: 11361 - DNA, 201 bp, Homo sapiens
caaatcaaatggagtttctgtgtgttcagagaaaggggttggtgggagggttgtctcagtgctcctgagtctcataagtaggttttttgagggaaaggagraagaaggcgagaaagtattaggatagaatattatgcatgttcataataatagaatgagaatgtaactccttttgaaagggggaagtggaaaataatactc

SEQ ID NO: 11362 - DNA, 201 bp, Homo sapiens; identical to SEQ ID NO: 5974

SEQ ID NO: 11363 - DNA, 201 bp, Homo sapiens; identical to SEQ ID NO: 5975

SEQ ID NO: 11364 - DNA, 201 bp, Homo sapiens; identical to SEQ ID NO: 5976

SEQ ID NO: 11365 - DNA, 201 bp, Homo sapiens; identical to SEQ ID NO: 5976

SEQ ID NO: 11366 - DNA, 201 bp, Homo sapiens; identical to SEQ ID NO: 5978

SEQ ID NO: 11367 - DNA, 201 bp, Homo sapiens; identical to SEQ ID NO: 5978

SEQ ID NO: 11368 - DNA, 201 bp, Homo sapiens; identical to SEQ ID NO: 5980

SEQ ID NO: 11369 - DNA, 201 bp, Homo sapiens; identical to SEQ ID NO: 5980

SEQ ID NO: 11370 - DNA, 201 bp, Homo sapiens; identical to SEQ ID NO: 5982

SEQ ID NO: 11371 - DNA, 201 bp, Homo sapiens; identical to SEQ ID NO: 5983

SEQ ID NO: 11372 - DNA, 201 bp, Homo sapiens; identical to SEQ ID NO: 5986

SEQ ID NO: 11373 - DNA, 201 bp, Homo sapiens; identical to SEQ ID NO: 5986

SEQ ID NO: 11374 - DNA, 201 bp, Homo sapiens
cagctacctatagcaattgtaatagaatgttgaagctaatacatttgtcatgctgcgtttgaaatacaaatacttgaggatagggtaaggtaagtgtctgrgagaatttatttatgtttgcttgtttataccaattgttatgaatttttcaattctttctcagatgtagaggaattacaggaccaaaagttgcatggacta

SEQ ID NO: 11375 - DNA, 201 bp, Homo sapiens
atctttgtggaatcctttaagtactgaaaaggttataaatgatctaactttcaaaatttaggcagaataaaatgaaataattaaaagacatgtctcagatrtgttcgtttaacagcatgccacctataaagctagtcagtgaaacgttgcaatgtatatttccacattgaatgccatcaatcctattgactttatcttctg

SEQ ID NO: 11376 - DNA, 201 bp, Homo sapiens
aatttgtacttatttggtcaccacttaaactatggtgttaaaagaacatttgtaaataagagtcagagttttataattgctagtgttggagaatctgtctmcacttttgaaagacaatctttttcttgacactgttttcaaataaagcatgtattttcatgtagaaacacaagacttcttgccattttataggacaactac

SEQ ID NO: 11377 - DNA, 201 bp, Homo sapiens
aatcctattgactttatcttctgaaaaatgtggttgtagtaaacacacacacacacacacacaccacacaactctgcagagctaaatttgaagaacatctrtgagctatgtaatgatcaagcatgaacgaaggttaatttggcccacaccagtcatcacattcctgaatcatcagttgattctattagactatgttaatta

SEQ ID NO: 11378 - DNA, 201 bp, Homo sapiens
gtgggtgttattaagggcctagaacatgggacatttcattcagtatgtgaatttatttatttatctatttttttttgagatggggtcttgctctgttgccsaggctggaatgcaatggtgtgatcttggctcactgcaacctccatctcccaggttcaggcgattctcctacctcagcctcccaagtagctggggttacag

SEQ ID NO: 11379 - DNA, 201 bp, Homo sapiens
gtatctgttgtttctttgggcttcaggggtgtcgtagaaattcagactaagatttaaatttttaattaaattactcccaactgtatttttctctactcttstgaaattctagttcctcagctattgtggataatcctgccttttcacttctctgcatcttttaagcctatatggatttccaccgaaagcccaaagttactt

SEQ ID NO: 11380 - DNA, 201 bp, Homo sapiens; identical to SEQ ID NO: 5991

SEQ ID NO: 11381 - DNA, 201 bp, Homo sapiens; identical to SEQ ID NO: 5991

SEQ ID NO: 11382 - DNA, 201 bp, Homo sapiens
gttctgccaggctccatatagcatgacaaatctctccttaaaatctgccttctggccggctgtagtggctcacgcctgtaatcctagcactttgggaggcmgcactgggcagatcacttgaggtcaggtgttgttcgagaccagtctgaccaacgtggtgaaaccccgtctctaccattaaaaaaaaaaaaaaaaaaaaaa

SEQ ID NO: 11383 - DNA, 201 bp, Homo sapiens
gtatttgagattttttactttggggcccctaagagatactttcagagcaaggctgctgctgctgtgtgtgtgtatatgagtgtatgttttgtgtgcttgtrtgtaggggtgggggcacacacacgtgtttgagtagaaaagcacctcttaaatacagacagaaaataagaacaaagacaacttggagggcaagaatactga

SEQ ID NO: 11384 - DNA, 201 bp, Homo sapiens
tagagcacttccccaatccatattcagtttataatctaaaatgtattttacaaagaagtaaatggattgttcgggctccagagatgtcttttttcatgcasaggattttttacttttaacaggatacaatgagtgatcaagcactcgaggctctgtcggcttcactgggcacccggcaagcagaacctgagctcgacctcc

SEQ ID NO: 11385 - DNA, 201 bp, Homo sapiens; identical to SEQ ID NO: 5994

SEQ ID NO: 11386 - DNA, 201 bp, Homo sapiens; identical to SEQ ID NO: 5994

SEQ ID NO: 11387 - DNA, 201 bp, Homo sapiens
gcattgtattttcagtgccagatgtcaacaaagggcttaataaatacttgttagataaaaatttaatgaaagatgattttacatattccagtctcacttcrgctgaactacattggtcctttgtggactaagtaatccaggcagctctgagagcaagccagtctttaggggaacagatcatacccacaagaaagttgaggg

SEQ ID NO: 11388 - DNA, 201 bp, Homo sapiens
agaatttatttatgtttgcttgtttataccaattgttatgaatttttcaattctttctcagatgtagaggaattacaggaccaaaagttgcatggactaamaagccaaagataaaataactagagaggaggaaaaagaaaaatgaaaacacttaacatcagcaactttaaatgcagtagaacaaataagtctttccaaacc

SEQ ID NO: 11389 - DNA, 201 bp, Homo sapiens
atttgtacttatttggtcaccacttaaactatggtgttaaaagaacatttgtaaataagagtcagagttttataattgctagtgttggagaatctgtctayacttttgaaagacaatctttttcttgacactgttttcaaataaagcatgtattttcatgtagaaacacaagacttcttgccattttataggacaactact

SEQ ID NO: 11390 - DNA, 201 bp, Homo sapiens
ctttcatgcagtaatctgtgctgccaacaggggccaaggccctcagctaaattcccactacaccctgcgccattgctgattttcagctgttctgtatagasattttactgttcatgggggccctctgaaagttttctcctttctggaatttgaggatcacttcaaggtattgtttaataaagtaacaaggcaggctggaca

SEQ ID NO: 11391 - DNA, 201 bp, Homo sapiens
aatgtttctttaaaaatacaaagtagaagtaaacatattaagatttcatcctgtttcctgattaaattaataaaagataaatttccattaaaaaaaaaaamcacaaatttttctttttcccaacatgaaagtctacctagtgtcagccaggcacggtggctcatgcctgtaatcccagcactttgggaggccgaggtgggt

SEQ ID NO: 11392 - DNA, 201 bp, Homo sapiens
gatgaatgtagccatgtgaatttcagagttctttctcccttgctatttgtcaatagtttttacttttttggaatattaccccaacacacaaccattaagtratcctaagatacctgcagcaattttatttttattttttgagatgaggtcttactctgtcacccaggctggagtgcagtagtgtgatcatggctcaccgca

SEQ ID NO: 11393 - DNA, 201 bp, Homo sapiens
aatcttacctcctgttattgttattattattattggtgttactttattattattagctcagtaaagagaacttgtttggcaataaaggtgagtctcgtatygatgtctacctatgggatggggcagggctcaaattctttggttgattatatattgcagcaccttcccattaaaaaatgagggaagtttgatagtttatta

SEQ ID NO: 11394 - DNA, 201 bp, Homo sapiens
gtttggcaggaaaggaagagaataccgtaagcattttttttctgtagattctgtaaaggtagtagagcaccagagatcatttgatgaaaatagctaacacwtaaataggcattatatacacatgcaaatacatgtgtgcacacatgagcacacacatgcgccttatggcaaccccattctcctgataaggaaattgaggca

SEQ ID NO: 11395 - DNA, 201 bp, Homo sapiens
catatttctaaatcaccctgcatagacattgtaacattgtatactctctatggcactgtaagggtgagtgaagtttttggaagtacatgagaactgcctcrgtgagttttgcagttctccaaaatcactgaatattgaacaattgagacttattcaacttactcttcatttcaatatttgtatcatcttcaggcaaagtaa

SEQ ID NO: 11396 - DNA, 201 bp, Homo sapiens
taattatatcacgtaatcccctcacaatcttcttcttattcctttatacctgaggaaaccagagctcaaggaggttaagtaaccttgacaagctcacaacrccagtaagatggagatagggcttgaacccaggtttcctgttaagaggtctttgacaatgctgggtcttataaactccatctaagcaatttttggtaatat

SEQ ID NO: 11397 - DNA, 201 bp, Homo sapiens
gcaaggaacccttttttctttctttattttttccctggagtttctgcaattggccagacgtgatgctaggcatacagaggtatggcccatataacaaatayaaagagcaatgtaaaaagtgttaaatggcagtgctgtcacgatactgtaaaagcggagtgaaaggttaaaggaagagggttgaggttaagcttgggagcc

SEQ ID NO: 11398 - DNA, 201 bp, Homo sapiens
gtgcaaagacaagttcatcaacaatcagaataacctgcccctgaattctttctaatgattcattttctcaatctagtttctaatttcatatttggcagctrccacctggtaaatacatctccttagctagaggaggaaaacttcacacccagtttactcaccttttgtcgttttccctggttcctgtcaaagttgttgctt

SEQ ID NO: 11399 - DNA, 201 bp, Homo sapiens
acctcatgatccaatcgaccttcacagggaaggtctctaatgaactaaaccaactgatgttcatggcccacgtttggagcctgagcaaggtcatggaccaytgatatttcactcaaagttgccgtaacagattaaagcgcttagtatgcaagtattctccctgagctctataatggactgaggtcccccataccagtgact

SEQ ID NO: 11400 - DNA, 201 bp, Homo sapiens
cctttttcccctatgttgtagatctgcctctaccaagtggtttttagtacgttgctgcctgtggtcattcagatttcaacagcgttaatatcttggcttgrtgcttccactatacagaaataaatttggtccttgagtgcccaatggcacaagtttggaatttatttttctcatgcatatgcatttttacactcatggctc

SEQ ID NO: 11401 - DNA, 201 bp, Homo sapiens
ctgcccaggctggtctctaactcctgggctcaatcaatcctcccacctgagcctcccaaagtgctgggattataggcatgagccactgtgcccagcgaccrtctctttaatatttgcaaagattgatacaacactgcctctttaatatttgcaaaattaaacttgctgtcagtatacatttgtgaatttgttcttcttagg

SEQ ID NO: 11402 - DNA, 201 bp, Homo sapiens
aggaagcagctcagggttttgcgtatatgtgttttatttttaagttgtacaactcctggttgatgacagtcataacgtaaatgacctaaagtttaaattgygttattctaatcagttttctgacctctgctgtcaacagaatttctgacgatcaaataataaaactcagacaatattggttttgtgccataaaataatact

SEQ ID NO: 11403 - DNA, 201 bp, Homo sapiens
accagagaagaattgttactatttcaattttacatatgaggaaactgaggcagagaggttaagcaacttgctcaaggttgcatgtgcattaaatggcagcyggattccaccatggtcttgagaccagaatccactctaacccttttaacctgtgtgttatgctgcctgatgtggtgctcgtgagatggtaaggacaccttc

SEQ ID NO: 11404 - DNA, 201 bp, Homo sapiens
taaaaatcaggcagaaggcattaaactttgtctaggacttattgatatttcatcagtgcggaaacatggtagacatttattttagaaagattagtcagccmtagacagaaaggattgagagacaaataagggtaaggatggcaactattagatggaaactattaaaagggggtttctatccaggtatgggtgataggtgat

SEQ ID NO: 11405 - DNA, 201 bp, Homo sapiens
ttccggaagaaaacaagttagaggtatagggagggaacccagggctcctaaagccacagcagccaacaaggagagaacagtcagtgaatgactcaaagtgmaactgccaatggattgtcaagtggagaaggagggaacatgcacgcagcccagtgttcttagtaaccctcaacaaacaaagacagattcaggtgtgtgaag

SEQ ID NO: 11406 - DNA, 201 bp, Homo sapiens
tattaattctttagaggtattttggtgtatatgagcactgatggttgtgctttaaaattggcagcccgttgatgttagcaggaccagccaagtggcaggcmctgcagtagagggacctgggttagaagtcagatggccaagctcccaggcctggcgtacacagctcggagggtcctcgtgcagagagtgctcctttccagc

SEQ ID NO: 11407 - DNA, 201 bp, Homo sapiens
aatgttatccacatcaatgatacgaaattcaaacaatgcaaaagagtatacaatgaaagtgtattcattcattcaccagagattacaaatattgaaagttkcttgtctttacagagagaataaaaattgaacaagctgtagccagaatcgaatggattaataatggggtgggcatattccctacttccagctcccatgaag

SEQ ID NO: 11408 - DNA, 201 bp, Homo sapiens
gtgagggaagaaaactttcatgcagtaatctgtgctgccaacaggggccaaggccctcagctaaattcccactacaccctgcgccattgctgattttcagstgttctgtatagagattttactgttcatgggggccctctgaaagttttctcctttctggaatttgaggatcacttcaaggtattgtttaataaagtaaca

SEQ ID NO: 11409 - DNA, 201 bp, Homo sapiens
ttaatgagcatctgcaatttgccagacattttgccacactatctcaaatacgaccctgcaaatagatgttactgtactttgtatgtaaatggacctggaaracaaagctcaaagtcacagagcttgtaactgacagagctggggcttgaacaaaattttgttgagttgcaaaatccatgttttttctgaaaataacataaa

SEQ ID NO: 11410 - DNA, 201 bp, Homo sapiens
atctgcaatttgccagacattttgccacactatctcaaatacgaccctgcaaatagatgttactgtactttgtatgtaaatggacctggaagacaaagctyaaagtcacagagcttgtaactgacagagctggggcttgaacaaaattttgttgagttgcaaaatccatgttttttctgaaaataacataaacagtaatta

SEQ ID NO: 11411 - DNA, 201 bp, Homo sapiens
agttttttaattgaagatattcctctaagtacatttctctacattgaaatgagaatataaattattaattcttgctaaaatggtcttactattctgagcayttaaaaataaatataaaaatgaaagattatactaaatgaacataaaaatatactggttatttcggatgctttcccaagttgttttttctgaaatttgagt

SEQ ID NO: 11412 - DNA, 201 bp, Homo sapiens
atttctaaattgctttcaaaatatacattatataatctataattaatgttagctgtctctatttaattatgttaagcttaatcttaaaaaattaaaaatctttttttttccttgaggcagggtctcgctctgtcttccaggctggatgtagtggcatgatcacagcttgctgccaccttgacctcctggatgcaagtgatc

SEQ ID NO: 11413 - DNA, 201 bp, Homo sapiens
tcttttggttctttttcatcctgttgcctgattctaatcccctgtgcctcagctcaaggaccaatgtttatttcaagcgtggcctgttacctagaacaaaygtcagcaaactcttcacccttctctaagcattaatcatgagaattctcggcagtcctgtgaaactggaggaaagtaggagagagaagagggggagagaca

SEQ ID NO: 11414 - DNA, 201 bp, Homo sapiens
aaaatttctttaaaaacatttcaatcataagctttgtttccttcccaaaatagtgtgttagcctagcaaggggccattatttgaagaaagtatgtgtcttyattactgaagtagaagacatgataaattaagaggataattgactttagcctcttcaaataaaaataaataaataaaaaccactagtttgtgctgatacta

SEQ ID NO: 11415 - DNA, 201 bp, Homo sapiens
ggctttgtgatgaaggtttttattttctgttgcccatttatgtgttaccatgtaaatagtaataaatctttacatatctttgatatacctagcaaggagayataaattgctccctgaatagtaaagcagaatattaactagtatacctaattgtttatctaaagagttgcaatttcaagcaaagtgtaacaaacttaactg

SEQ ID NO: 11416 - DNA, 201 bp, Homo sapiens
taacattaagtccgtatattgttaaaaagaatatataatattttataaatgaaaactatttcagaagcattttgttcaaatctagttttttgttatatgtrtagtgattgctttaaaaaagaaaaaagcaagaggaacagaagaaaaaaggcaaagagtagtaatgaatatccaattccaattccaatgagacatcaagaa

SEQ ID NO: 11417 - DNA, 201 bp, Homo sapiens
cacctagatggcttagggatgagaatctttcctaagaggctggctgggtttatcgtgacagtcttacctcagttggtggagctagttaacagttacacagraggctagcttctgttactttcctgacccatgactgtccagaatgaatgccattctgcctctgcatggaggtgaaccccaggttgtgtacggcagcacaaa

SEQ ID NO: 11418 - DNA, 201 bp, Homo sapiens
aaatacttttatctactgaatcgcaagaaaattgggtttctggtggtaagatcttctctactaacaaagaaacaaaactctgtaaatcctatgaaaggagtttttttttttttttgcttttgagacggagtctcgctctgtcgcccaggctggagtgcagtggcgccatcttggctcactgcaagctccgcctcccgggtt

SEQ ID NO: 11419 - DNA, 201 bp, Homo sapiens
ggagaggcttatgtggaagtctgccgtgcattgacttgtgctggaacttgcagcaagtcattttactttacgttgcctctgattcttctcccattaaatargatttaatgacttgccttcttattttagtacatagcatgtttaaagtaccataaggcaggcagatcacctgaggtcaggagctcaagaccagcctgacca

SEQ ID NO: 11420 - DNA, 201 bp, Homo sapiens
gtagaaggttggtcagggactgtttcagtagtcctgatgagtcatattttagcctaaattagagctgtgatagaataagaaagtggggagttatccaagaygaattgcagagcaaaaatcttcaggttttaggaaatgattgacagaagtgggcaaagacaaagtaaaatctaagataacctggtgcttctgagtctgatt

SEQ ID NO: 11421 - DNA, 201 bp, Homo sapiens
aaggaaagaggaggtgttgagatgccgaagtgagggatatggaagtcttgatgtgtgggggcaaagagccagagagcaaagccagaagtggcagcctataraaagaattcatggatgttgtaaaaactggctgtgggccctggagaagaacagcgaggaaagaaacagtcttggattcaaatcttcattctgtcccttact

SEQ ID NO: 11422 - DNA, 201 bp, Homo sapiens
catcactaaatgagactaatataattaaagcccttctgaaaaaggatataaaacacacagcacagtttctgctgtagagcggatgttcagtgtatgatcartgcttgttaatataatgaatttattttaaaatttgtaatagtattgagttttattaaggtatgtgaggagttgttaatttctcaattctcaccagaaaaa

SEQ ID NO: 11423 - DNA, 201 bp, Homo sapiens
ttttaatgaattattgtttcaagctaatattgaaagtgtgggttggaagtatggttttcacactcatgtttgtaacacttgctattataaccccttttttwaaaaaaaacaaacaaactccagtttcatcccatggagtttacattccagtttctctcctgcaaatacactttatttaaccagaggtattactaaagaagt

SEQ ID NO: 11424 - DNA, 201 bp, Homo sapiens
tctgtcatttgcatagaaacaggatgatgtcagtatcaacatcaacacagcaactaaaaattagtatcggggatggaaattgtcttttggcagctgcattrtaacattgagttagcaaacatttgttgttgtgctaagattgacactgggacacggtccactgggtcacacacttattttccatcctcaagatttaagtat

SEQ ID NO: 11425 - DNA, 201 bp, Homo sapiens
ctggcaggctggggaacagtggtgagtaccacacccctgagagtgggagttcctacaacgatcagccattgtgccttcagagaagaaggcagcaggggccrcttcaagcttccctgcttcctaagcttaggttgtcagaagcctttttagagatacatttttagaaaaagaaaaatagtgtggtaacagtttactacttgc

SEQ ID NO: 11426 - DNA, 201 bp, Homo sapiens
tgcaaggtttcaaataaaattgcctttctagagcacttccccaatccatattcagtttataatctaaaatgtattttacaaagaagtaaatggattgttcrggctccagagatgtcttttttcatgcacaggattttttacttttaacaggatacaatgagtgatcaagcactcgaggctctgtcggcttcactgggcacc

SEQ ID NO: 11427 - DNA, 201 bp, Homo sapiens
ccttgagtctgggactgccctggcctaagatgggccagtttctatcttcgactttcttggagggctcaccggccacagtgtggcacgataagctttgtgayggtgaacgcagaggagcaagagaagcagttcgtatcttccaggaccaagtaatgtattgggaagaagggaaacttgattacaacacaatgtgagatatac

SEQ ID NO: 11428 - DNA, 201 bp, Homo sapiens
accatgtgttcatttaaattcccacagatttaaatgtttcgtttattaacagttcttacaatagatcctaaaactcagaaggaacaatttggggataattycttttctaactgctatatggataaaagcaccataggtcttctgaggggtagatatgaatgtacgagggtttaccagtatcctaagtgaaggtggttttgt

SEQ ID NO: 11429 - DNA, 201 bp, Homo sapiens
attacatttgtcatttacttttgaaatcatgcatataaacacatgttggaaaatagttacaattctaagttatgaaacctcatatccaaaaaaactaaacmgtgttataggaatgatatccacctcttcactctaggttggagaattggggttttttaaaagcttcgattaacatagctacatctttattgccaaagaact

SEQ ID NO: 11430 - DNA, 201 bp, Homo sapiens
ctgtagttatgtcattcctctgcttctatccccaggagtttcccatccctacaaaaaaaagttcctattaccatattcttgacccagttttctttcctacmaaactgtgtccctgtgtcagtaaacagaacaataagtatgtgtgcatccctggcttttctcacttggttcctctgtcttgattgacctttctttctaatg

SEQ ID NO: 11431 - DNA, 201 bp, Homo sapiens
cagtcttattaaccaaatatttctaaacttattgagagtacttgtgtctttcctcaggaatctaaggccgctgctccagctcctgtgtcggaggctgtgtstcggacctccatgtgtagtatacagtcagcaccccctgagccggctaccttggtgagtgactccctgggcatttgagcagtggcttgagaaagttttctg

SEQ ID NO: 11432 - DNA, 201 bp, Homo sapiens
ctctttccttcttcttttcgtgcttctctctcactttctaattttcacatgaagtatgatatttaagaaggtgaatctttgtttccttttgattttagtgttttttttccattagttaatgattgaatttgactcagggaataacatctgatggaattatatttcaattgtatttcattactacagaattagcacatcttc

SEQ ID NO: 11433 - DNA, 201 bp, Homo sapiens
gttttttttccattagttaatgattgaatttgactcagggaataacatctgatggaattatatttcaattgtatttcattactacagaattagcacatctwccctctgaacacctacctttcatcatctgctgtgccattgctctagatgttttgcaatgtcttctcattaaattttcacaaggacactatgaagtctgtc

SEQ ID NO: 11434 - DNA, 201 bp, Homo sapiens; identical to SEQ ID NO: 5998

SEQ ID NO: 11435 - DNA, 201 bp, Homo sapiens; identical to SEQ ID NO: 5999

SEQ ID NO: 11436 - DNA, 201 bp, Homo sapiens; identical to SEQ ID NO: 6000

SEQ ID NO: 11437 - DNA, 201 bp, Homo sapiens; identical to SEQ ID NO: 6001

SEQ ID NO: 11438 - DNA, 201 bp, Homo sapiens; identical to SEQ ID NO: 6001

SEQ ID NO: 11439 - DNA, 201 bp, Homo sapiens; identical to SEQ ID NO: 6003

SEQ ID NO: 11440 - DNA, 201 bp, Homo sapiens; identical to SEQ ID NO: 6003

SEQ ID NO: 11441 - DNA, 201 bp, Homo sapiens; identical to SEQ ID NO: 6005

SEQ ID NO: 11442 - DNA, 201 bp, Homo sapiens; identical to SEQ ID NO: 6005

SEQ ID NO: 11443 - DNA, 201 bp, Homo sapiens; identical to SEQ ID NO: 6007

SEQ ID NO: 11444 - DNA, 201 bp, Homo sapiens; identical to SEQ ID NO: 6007

SEQ ID NO: 11445 - DNA, 201 bp, Homo sapiens; identical to SEQ ID NO: 5853

SEQ ID NO: 11446 - DNA, 201 bp, Homo sapiens; identical to SEQ ID NO: 5853

SEQ ID NO: 11447 - DNA, 201 bp, Homo sapiens; identical to SEQ ID NO: 6011

SEQ ID NO: 11448 - DNA, 201 bp, Homo sapiens; identical to SEQ ID NO: 6011

SEQ ID NO: 11449 - DNA, 201 bp, Homo sapiens; identical to SEQ ID NO: 6013

SEQ ID NO: 11450 - DNA, 201 bp, Homo sapiens; identical to SEQ ID NO: 6013

SEQ ID NO: 11451 - DNA, 201 bp, Homo sapiens; identical to SEQ ID NO: 6015

SEQ ID NO: 11452 - DNA, 201 bp, Homo sapiens; identical to SEQ ID NO: 6015

SEQ ID NO: 11453 - DNA, 201 bp, Homo sapiens; identical to SEQ ID NO: 6017

SEQ ID NO: 11454 - DNA, 201 bp, Homo sapiens; identical to SEQ ID NO: 6017

SEQ ID NO: 11455 - DNA, 201 bp, Homo sapiens; identical to SEQ ID NO: 6019

SEQ ID NO: 11456 - DNA, 201 bp, Homo sapiens; identical to SEQ ID NO: 6019

SEQ ID NO: 11457 - DNA, 201 bp, Homo sapiens; identical to SEQ ID NO: 1083

SEQ ID NO: 11458 - DNA, 201 bp, Homo sapiens; identical to SEQ ID NO: 1083

SEQ ID NO: 11459 - DNA, 201 bp, Homo sapiens; identical to SEQ ID NO: 6023

SEQ ID NO: 11460 - DNA, 201 bp, Homo sapiens; identical to SEQ ID NO: 6023

SEQ ID NO: 11461 - DNA, 201 bp, Homo sapiens; identical to SEQ ID NO: 6025

SEQ ID NO: 11462 - DNA, 201 bp, Homo sapiens; identical to SEQ ID NO: 6025

SEQ ID NO: 11463 - DNA, 201 bp, Homo sapiens; identical to SEQ ID NO: 6027

SEQ ID NO: 11464 - DNA, 201 bp, Homo sapiens; identical to SEQ ID NO: 6027

SEQ ID NO: 11465 - DNA, 201 bp, Homo sapiens; identical to SEQ ID NO: 6029

SEQ ID NO: 11466 - DNA, 201 bp, Homo sapiens; identical to SEQ ID NO: 6029

SEQ ID NO: 11467 - DNA, 201 bp, Homo sapiens; identical to SEQ ID NO: 6031

SEQ ID NO: 11468 - DNA, 201 bp, Homo sapiens; identical to SEQ ID NO: 6031

SEQ ID NO: 11469 - DNA, 201 bp, Homo sapiens; identical to SEQ ID NO: 6033

SEQ ID NO: 11470 - DNA, 201 bp, Homo sapiens; identical to SEQ ID NO: 6033

SEQ ID NO: 11471 - DNA, 201 bp, Homo sapiens; identical to SEQ ID NO: 6035

SEQ ID NO: 11472 - DNA, 201 bp, Homo sapiens; identical to SEQ ID NO: 6035

SEQ ID NO: 11473 - DNA, 201 bp, Homo sapiens; identical to SEQ ID NO: 6037

SEQ ID NO: 11474 - DNA, 201 bp, Homo sapiens; identical to SEQ ID NO: 6037

SEQ ID NO: 11475 - DNA, 201 bp, Homo sapiens; identical to SEQ ID NO: 6039

SEQ ID NO: 11476 - DNA, 201 bp, Homo sapiens; identical to SEQ ID NO: 6039

SEQ ID NO: 11477 - DNA, 201 bp, Homo sapiens; identical to SEQ ID NO: 6041

SEQ ID NO: 11478 - DNA, 201 bp, Homo sapiens; identical to SEQ ID NO: 6041

SEQ ID NO: 11479 - DNA, 201 bp, Homo sapiens; identical to SEQ ID NO: 6043

SEQ ID NO: 11480 - DNA, 201 bp, Homo sapiens; identical to SEQ ID NO: 6043

SEQ ID NO: 11481 - DNA, 201 bp, Homo sapiens; identical to SEQ ID NO: 6045

SEQ ID NO: 11482 - DNA, 201 bp, Homo sapiens; identical to SEQ ID NO: 6045

SEQ ID NO: 11483 - DNA, 201 bp, Homo sapiens; identical to SEQ ID NO: 6047

SEQ ID NO: 11484 - DNA, 201 bp, Homo sapiens; identical to SEQ ID NO: 6047

SEQ ID NO: 11485 - DNA, 201 bp, Homo sapiens; identical to SEQ ID NO: 6049

SEQ ID NO: 11486 - DNA, 201 bp, Homo sapiens; identical to SEQ ID NO: 6049

SEQ ID NO: 11487 - DNA, 201 bp, Homo sapiens; identical to SEQ ID NO: 6051

SEQ ID NO: 11488 - DNA, 201 bp, Homo sapiens; identical to SEQ ID NO: 6051

SEQ ID NO: 11489 - DNA, 201 bp, Homo sapiens; identical to SEQ ID NO: 6053

SEQ ID NO: 11490 - DNA, 201 bp, Homo sapiens; identical to SEQ ID NO: 6053

SEQ ID NO: 11491 - DNA, 201 bp, Homo sapiens; identical to SEQ ID NO: 6055

SEQ ID NO: 11492 - DNA, 201 bp, Homo sapiens; identical to SEQ ID NO: 6055

SEQ ID NO: 11493 - DNA, 201 bp, Homo sapiens; identical to SEQ ID NO: 6057

SEQ ID NO: 11494 - DNA, 201 bp, Homo sapiens; identical to SEQ ID NO: 6058

SEQ ID NO: 11495 - DNA, 201 bp, Homo sapiens; identical to SEQ ID NO: 6059

SEQ ID NO: 11496 - DNA, 201 bp, Homo sapiens; identical to SEQ ID NO: 6060

SEQ ID NO: 11497 - DNA, 201 bp, Homo sapiens; identical to SEQ ID NO: 6061

SEQ ID NO: 11498 - DNA, 201 bp, Homo sapiens; identical to SEQ ID NO: 6062

SEQ ID NO: 11499 - DNA, 201 bp, Homo sapiens; identical to SEQ ID NO: 6063

SEQ ID NO: 11500 - DNA, 201 bp, Homo sapiens; identical to SEQ ID NO: 6064

SEQ ID NO: 11501 - DNA, 201 bp, Homo sapiens; identical to SEQ ID NO: 6065

SEQ ID NO: 11502 - DNA, 201 bp, Homo sapiens; identical to SEQ ID NO: 6066

SEQ ID NO: 11503 - DNA, 201 bp, Homo sapiens; identical to SEQ ID NO: 6067

SEQ ID NO: 11504 - DNA, 201 bp, Homo sapiens; identical to SEQ ID NO: 6068

SEQ ID NO: 11505 - DNA, 201 bp, Homo sapiens
aaaaagtttggaaaaattactgagaactttacttaagaacaatttgtatactctatgcatattctgcttagtttctgaattggttgagactcttggttaayaaataacagaaaaagcaacttgtactgttaaaacaaaaatgaggggagattattttgaaggctatagcgtacgtcccagaaccaaagccttttgagtgca

SEQ ID NO: 11506 - DNA, 201 bp, Homo sapiens
tgttgaaatactagatacacagacagtaagtacgacactttaagaggaaatgcatttaaatcctcttctccccgcatcccctccctcaaaattaagaatgytgctagcctatcctttgaagaagaagtcagaattcctaaaatgaggaggtacaaaggaaaccagaattctgttctgccaggctccatatagcatgacaaa

SEQ ID NO: 11507 - DNA, 201 bp, Homo sapiens
tgccttctggccggctgtagtggctcacgcctgtaatcctagcactttgggaggcagcactgggcagatcacttgaggtcaggtgttgttcgagaccagtytgaccaacgtggtgaaaccccgtctctaccattaaaaaaaaaaaaaaaaaaaaaaagctgggtgtgacaacgcgcctgtagtcccaagtacttaggagac

SEQ ID NO: 11508 - DNA, 201 bp, Homo sapiens
gcctgtaatcctagcactttgggaggcagcactgggcagatcacttgaggtcaggtgttgttcgagaccagtctgaccaacgtggtgaaaccccgtctctmccattaaaaaaaaaaaaaaaaaaaaaaagctgggtgtgacaacgcgcctgtagtcccaagtacttaggagactgaggcaggagaatcgcttgaacctggg

SEQ ID NO: 11509 - DNA, 201 bp, Homo sapiens
ctctccagaaaaaaaaaaaaaaaaaaaaaaaaggctctgccttctctctcttcaactgtctaaaccccaacgctgcagaaagcggtgaccccaagtcccaraatgatgatgctactgcagggtaacaaacaggttttctgtcaggcctgattgtgaaccagcagcaactgcaggctgacagtttctcacataagcacgtag

SEQ ID NO: 11510 - DNA, 201 bp, Homo sapiens
ttcaactgtctaaaccccaacgctgcagaaagcggtgaccccaagtcccagaatgatgatgctactgcagggtaacaaacaggttttctgtcaggcctgaytgtgaaccagcagcaactgcaggctgacagtttctcacataagcacgtagggcttgttaaatttcacttccagccccaaaccaggaagcgctgtttaaga

SEQ ID NO: 11511 - DNA, 201 bp, Homo sapiens
acgctgcagaaagcggtgaccccaagtcccagaatgatgatgctactgcagggtaacaaacaggttttctgtcaggcctgattgtgaaccagcagcaactkcaggctgacagtttctcacataagcacgtagggcttgttaaatttcacttccagccccaaaccaggaagcgctgtttaagatgagcccaagaagaaagca

SEQ ID NO: 11512 - DNA, 201 bp, Homo sapiens
tccaaatgaatgtgtgtagcatcccttgatttttgagagccacctatgttggtgtgaattaccagcattctcaggaggaagattaaagtggtcgttttttwaaaaagggtatgcatttagcctttggggattaaagttactgtcatctgtgtcatcttcctttattaagcattattttttacttttttatagcatgtcagt

SEQ ID NO: 11513 - DNA, 201 bp, Homo sapiens
atcccagcactttgggatgctgaggcgggcagatcacaaggtcaggagatcgacaccatcctggctaaaatggtgaaactccatctctactaaaaataccrgaaaaaattagtctggcaaggtggcgcgcacccgtagtcccacctactcaggcagctgaggcaggagaatcacttgaacccgggaggcagaggttgcagt

SEQ ID NO: 11514 - DNA, 201 bp, Homo sapiens
gggaggcggaggttgcagggagccaagatcacaccactgcactccagcctgggcaacagaacgagactctgtctcaaaaaaaaaaaaaaaaaaaaaaaaaraagaagaagaaaagaaaaatggaaaataaacaccctcatctaggattctagcacctagagaaatgggcactatgtacatcttggtgtattttcctgcatc

SEQ ID NO: 11515 - DNA, 201 bp, Homo sapiens
cttggaatgtctgttatttcattatttctttaattattactcttgtttcggtttcccttgtttcttcctaaacctacatatgcaatagttcctctttatcrgctgtttcgcttttcatgatttcagttacccacggtacaatacaatgagatattttgagagagagagaccccatccacataacttgtattacagtatatt

SEQ ID NO: 11516 - DNA, 201 bp, Homo sapiens
gctagaactaaagacctctgcatcactatctttttttttttttttgagatagagtctcactttgttgcccaggctggagtgcagtggtgcaatcttggctyactgcaaactctgcctcctgggttcaagcgattctcctgccttagcctcccaagtagctgggactacaggtgtatgccaccacgcccaaataactttttt

SEQ ID NO: 11517 - DNA, 201 bp, Homo sapiens
tttgctcgcactgaatgtcagagcgtgaccgaaagcactttcatgcatttaaatgaactttggttgggtactacatccaattttttaaaattgaataaaasatattaaaaagggctagggacggtggctcatgcctgtaatctcagcactttagaaggccaaggagggaggatcgcttgaggccaggagtttgagaccagc

SEQ ID NO: 11518 - DNA, 201 bp, Homo sapiens
accagcatttttatttttcaggattcttccctttcatatgttccatctctttatttttctgtgctgcattgtgattaatggcctcagatctatcttccagwcgcttaagtctctatgcagttatgtgtagtttatattttcacctatttttgatttggggcttttattttttcttttgtgtctttgatttttaaaatttat

SEQ ID NO: 11519 - DNA, 201 bp, Homo sapiens
catctctttaatatttgcaaagattgatacaacactgcctctttaatatttgcaaaattaaacttgctgtcagtatacatttgtgaatttgttcttcttargtggtttccagaataacattttatttcactccccattttcatgttggttatttgacaatcagcttggataagagaaccttgttacagttctcatgacgtt

SEQ ID NO: 11520 - DNA, 201 bp, Homo sapiens
caacaacttcacccatttagtttctgccagtctctgaaagcatttgcctctggccatagagaatgattttggataagaccaccagcacagggcagaaatgygcagagtgtatacagtggggaccaaagtaaaagagatgccagaggtaatggagaacaaagggcatagatgccacaataggatcagaatggtgccgaaagg

SEQ ID NO: 11521 - DNA, 201 bp, Homo sapiens
ccacacccctgagagtgggagttcctacaacgatcagccattgtgccttcagagaagaaggcagcaggggccacttcaagcttccctgcttcctaagcttwggttgtcagaagcctttttagagatacatttttagaaaaagaaaaatagtgtggtaacagtttactacttgcttcttttttttttgtttgtttagagtat

SEQ ID NO: 11522 - DNA, 201 bp, Homo sapiens
tctcagctgtcttcaagactagtgtggatatgagccctccccagttttttggggtttcagggtactcttcaggtactttttacagcatgtgtgctaggccwcagtggtaaagaaccggagaggaggagggactctaggaggactctggtgaagaaagcaggcaaagaggctgtgattggagtcaaaacaacaatagccagc

SEQ ID NO: 11523 - DNA, 201 bp, Homo sapiens
ggtttcagggtactcttcaggtactttttacagcatgtgtgctaggccacagtggtaaagaaccggagaggaggagggactctaggaggactctggtgaaraaagcaggcaaagaggctgtgattggagtcaaaacaacaatagccagcattccccagtagaactcttgtaaccaaaacctgcacctgcaccacctgcctc

SEQ ID NO: 11524 - DNA, 201 bp, Homo sapiens
gtttcagggtactcttcaggtactttttacagcatgtgtgctaggccacagtggtaaagaaccggagaggaggagggactctaggaggactctggtgaagmaagcaggcaaagaggctgtgattggagtcaaaacaacaatagccagcattccccagtagaactcttgtaaccaaaacctgcacctgcaccacctgcctca

SEQ ID NO: 11525 - DNA, 201 bp, Homo sapiens
cggagaggaggagggactctaggaggactctggtgaagaaagcaggcaaagaggctgtgattggagtcaaaacaacaatagccagcattccccagtagaamtcttgtaaccaaaacctgcacctgcaccacctgcctcatctgccaagtgtgactgcccgggctttagagggctcaattccttttcaactttaccctgact

SEQ ID NO: 11526 - DNA, 201 bp, Homo sapiens
ggagaggaggagggactctaggaggactctggtgaagaaagcaggcaaagaggctgtgattggagtcaaaacaacaatagccagcattccccagtagaacwcttgtaaccaaaacctgcacctgcaccacctgcctcatctgccaagtgtgactgcccgggctttagagggctcaattccttttcaactttaccctgactg

SEQ ID NO: 11527 - DNA, 201 bp, Homo sapiens
tgcaatggcatgatctcggctcactgcaacctcaacctcctgaggtcaagcaatcctcccacctcagcctcttgaggagatgggactacaggcatgcaccrtcatgcctggctaatttttaaaaactttttgtaaagatgggatctcactgtgttgccccggctggtctcaaactcctgagctcaaacaatcttcctgcct

SEQ ID NO: 11528 - DNA, 201 bp, Homo sapiens; identical to SEQ ID NO: 6108

SEQ ID NO: 11529 - DNA, 201 bp, Homo sapiens; identical to SEQ ID NO: 6108

SEQ ID NO: 11530 - DNA, 201 bp, Homo sapiens; identical to SEQ ID NO: 6110

SEQ ID NO: 11531 - DNA, 201 bp, Homo sapiens; identical to SEQ ID NO: 6110

SEQ ID NO: 11532 - DNA, 201 bp, Homo sapiens; identical to SEQ ID NO: 6112

SEQ ID NO: 11533 - DNA, 201 bp, Homo sapiens; identical to SEQ ID NO: 6112

SEQ ID NO: 11534 - DNA, 201 bp, Homo sapiens; identical to SEQ ID NO: 6114

SEQ ID NO: 11535 - DNA, 201 bp, Homo sapiens; identical to SEQ ID NO: 6114

SEQ ID NO: 11536 - DNA, 201 bp, Homo sapiens; identical to SEQ ID NO: 6116

SEQ ID NO: 11537 - DNA, 201 bp, Homo sapiens; identical to SEQ ID NO: 6116

SEQ ID NO: 11538 - DNA, 201 bp, Homo sapiens; identical to SEQ ID NO: 6118

SEQ ID NO: 11539 - DNA, 201 bp, Homo sapiens; identical to SEQ ID NO: 6118

SEQ ID NO: 11540 - DNA, 201 bp, Homo sapiens; identical to SEQ ID NO: 6120

SEQ ID NO: 11541 - DNA, 201 bp, Homo sapiens; identical to SEQ ID NO: 6121

SEQ ID NO: 11542 - DNA, 201 bp, Homo sapiens; identical to SEQ ID NO: 6122

SEQ ID NO: 11543 - DNA, 201 bp, Homo sapiens; identical to SEQ ID NO: 6123

SEQ ID NO: 11544 - DNA, 201 bp, Homo sapiens; identical to SEQ ID NO: 6124

SEQ ID NO: 11545 - DNA, 201 bp, Homo sapiens; identical to SEQ ID NO: 6125

SEQ ID NO: 11546 - DNA, 201 bp, Homo sapiens
gctgaggcaatttttgttttgttttaagtcatttacaagaaatgccttcaagttaaatttcagtgtgcttagtaaggtatccgaggacagagaccacctcmtgctaatggcccccttatttactttaacagagataagtaatattttcccctcaagtctggcttttagaaatcttttgctcatcaattattctaatattta

SEQ ID NO: 11547 - DNA, 201 bp, Homo sapiens
aattaatcggatgtggtggtgcacacctgtaatcccagctacttgggaggctgaggcacaagaatagcttgagctcaggaggtggaggttgcagtgggccragatcgcaccactgctctccagcctgggtgacagagtgagactcagtctcaaaaaaaaaaaaaaaaaaaaaaagaactggaaaaatgtaattcatgaagt

SEQ ID NO: 11548 - DNA, 201 bp, Homo sapiens
tcctgagtggtatcaccatggagaacatcgctgttcagatcttcagttgctttattcatgaaccaaggcgacagtgggtactccctagagctgctatgggkagcaaagaagaccacataggagatgcctggcactgggcctagcacagagcagatgcttaggaggtgttaatttcttttctgtaattagttttgtggttca

SEQ ID NO: 11549 - DNA, 201 bp, Homo sapiens
tgaacctgataaggttcctttgtactttagggaaagtaaaatactaaattcttctgttctaatgtttacagccttagaaaatgaaaccctcaaaccttaaytcactggcttctaattcaccacagtcagattgccagggaaaaagaagggagtgaaataattttaattgtgttcttaaaatgaacaaggcaatgaaccagg

SEQ ID NO: 11550 - DNA, 201 bp, Homo sapiens
gtgcagtggtctgtgcctggcctcctcttgcatttctcatagataaaactacaagttcattctcatgacaactgctgtggcaacaaagcaactatttaaaktctcatgataccccctttgacttaagaaaaactcatccagccttacttcaggtgaatcccaggagctaatctatgacaggcaatagatgccacctctgaa

SEQ ID NO: 11551 - DNA, 201 bp, Homo sapiens
aataaaagttttttattctctaatgatagcccattataagtctcccacatttttaggtgtggctgcctagtctagtgccatttcaattcagtaggctcttytttttcgatgcctactgtatacaaaccagagcaggcatttcaagactataaagatcaaagaggaaaataaaagctctggccgcatgtgtaactttcactg

SEQ ID NO: 11552 - DNA, 201 bp, Homo sapiens
ttggctgatacctgtagctcctttccatatattttaaagatgatcttcctcataaatcattactagactataaatttctaggtaaaatttattgcacactwgaaactgatgtcaagagggcccttaagtcagattaagctagcacttagagttccatcctgatcaaattctctaatgattctattttgccttaagttggta

SEQ ID NO: 11553 - DNA, 201 bp, Homo sapiens; identical to SEQ ID NO: 6135

SEQ ID NO: 11554 - DNA, 201 bp, Homo sapiens; identical to SEQ ID NO: 6136

SEQ ID NO: 11555 - DNA, 201 bp, Homo sapiens; identical to SEQ ID NO: 6136

SEQ ID NO: 11556 - DNA, 201 bp, Homo sapiens; identical to SEQ ID NO: 6142

SEQ ID NO: 11557 - DNA, 201 bp, Homo sapiens; identical to SEQ ID NO: 6143

SEQ ID NO: 11558 - DNA, 201 bp, Homo sapiens; identical to SEQ ID NO: 6144

SEQ ID NO: 11559 - DNA, 201 bp, Homo sapiens; identical to SEQ ID NO: 6145

SEQ ID NO: 11560 - DNA, 201 bp, Homo sapiens; identical to SEQ ID NO: 6145

SEQ ID NO: 11561 - DNA, 201 bp, Homo sapiens; identical to SEQ ID NO: 6147

SEQ ID NO: 11562 - DNA, 201 bp, Homo sapiens; identical to SEQ ID NO: 6147

SEQ ID NO: 11563 - DNA, 201 bp, Homo sapiens; identical to SEQ ID NO: 6149

SEQ ID NO: 11564 - DNA, 201 bp, Homo sapiens; identical to SEQ ID NO: 6149

SEQ ID NO: 11565 - DNA, 201 bp, Homo sapiens; identical to SEQ ID NO: 6151

SEQ ID NO: 11566 - DNA, 201 bp, Homo sapiens; identical to SEQ ID NO: 6151

SEQ ID NO: 11567 - DNA, 201 bp, Homo sapiens; identical to SEQ ID NO: 6153

SEQ ID NO: 11568 - DNA, 201 bp, Homo sapiens; identical to SEQ ID NO: 6153

SEQ ID NO: 11569 - DNA, 201 bp, Homo sapiens; identical to SEQ ID NO: 6155

SEQ ID NO: 11570 - DNA, 201 bp, Homo sapiens
ataaaaaagagtccccttgtaatatacagcacttcttatattacagcctcggagtgaatcagaactcattgatgaactttcagaagattttgaccggtctraatgtaaagagaaaccatctaagccaactgaaaagacagaagtatgtttctaaacatataaatctctagttttgaggtttgtgatcttaaaaaaaaattg

SEQ ID NO: 11571 - DNA, 201 bp, Homo sapiens
aataaaaaagagtccccttgtaatatacagcacttcttatattacagcctcggagtgaatcagaactcattgatgaactttcagaagattttgaccggtcwgaatgtaaagagaaaccatctaagccaactgaaaagacagaagtatgtttctaaacatataaatctctagttttgaggtttgtgatcttaaaaaaaaatt

SEQ ID NO: 11572 - DNA, 201 bp, Homo sapiens
agtggttagcaactaagggggatagttacatgactgacttgtgaaacagctagaattttaacatttgaaatgaacacgaatctcccttgctagagcttaartgacccttgactaaacaaggtaacaaggaggcaatgcctggtgggaaatagtgaagtttggcaattggaaatttgtattttcagaagggttctgggtgct

SEQ ID NO: 11573 - DNA, 201 bp, Homo sapiens
cgccctccctgggcgttgccaggctggcgggtctgcagtccccggcgcccccgcggggcagggagagggctaggggcttggccgctgccaggcaggtggcwgcaggtggctgcaggtggctgcaggtggcttcggttccccggccgggtccagtgcgctgggcgtggcgttggccgggtagagtggagggggggacgcgtc

SEQ ID NO: 11574 - DNA, 201 bp, Homo sapiens
ctgctgggttacttggatgaaagtagtttgaatctatgcttttaaccctgttttgtttagtcacagtctgatgtttttgctaaaacctctcttagaatccmattttggtactaccatgaaaactttttgctagtaggaacttcctagaaccagctacatgcctgtgatcaagctttagctttgcccaaaccagtgctattc

SEQ ID NO: 11575 - DNA, 201 bp, Homo sapiens
gctacatgcctgtgatcaagctttagctttgcccaaaccagtgctattcaatagaaacataatgtgagccacgtctgcaatttcagatttccaaggagccrctttaacaacaacatcacaacaaaaagcaggtgaaatttgtgctaattgatatattttacttaacctactatatcccacatattattatttcatcatgta

SEQ ID NO: 11576 - DNA, 201 bp, Homo sapiens
cccttgcactctaggagagtttctgaagtttgccccccacatattttatttctaaattctgctctttgaaacttctaatacaggtttaaattttggttttsgtttttggtttctttgtgtccccttcttatcctctcttacctctttgtctcactccattatcattccatctcaatctatagctctttactccatttcatg

SEQ ID NO: 11577 - DNA, 201 bp, Homo sapiens
ttgtatttgtataaaaataggaaaaaactgaaattagttgtcttggatgacaggattttaagtaattattatttcttcttcctactttttttaatcttaartgtatttattaaaccagaagaaaaagaacaataagcagcatagataataaaagagtaagataagagtgttttaccaatgaccagaaaagtacccatgcat

SEQ ID NO: 11578 - DNA, 201 bp, Homo sapiens
ggaataagccacctatagcaatgaggctgactagggatcccgtgtgtgtgcagcaaggactcctggtgtctattacgaatcagcatgctttgtagactgtkaaacagtgtttatgaagcagcacattcaagtataaatattggctgtggttcagttcagatgctttgaaagaagagtccgaatgccagagagtagttgatt

SEQ ID NO: 11579 - DNA, 201 bp, Homo sapiens
gacagatatcctgctacagctaaatggtaaagaaggtcatagggaaaatgagttttagggtaaaagtatggcacatctccctgaaacatcatttttttccytctgggattttgggagaaaaggcacattattttatccaaattaatacaggtctcctatggagcaaaggcaacatttacaaaaacttttaaatgaaaatat

SEQ ID NO: 11580 - DNA, 201 bp, Homo sapiens
aaaatatttgcattagggacagtttgatcactgggtataaagacagttatgaggaataagatctgttgttctattgcacagtagggtgactacagttaacrgtaatgtattatatacttcaaaataactagaaaacaggattttgaatgtcctcaccacaagaaatgatgaatgtttgaggcgacagatttagtaattaac

SEQ ID NO: 11581 - DNA, 201 bp, Homo sapiens
acattcatgacccctgcccttgtgccagagcctggacataccagtctttcagcttctgtcccaaccagcagaagtaaagaggggatagagactttgctctstccccatggcttaaatcatggctttagacaaaataaacataacagaatttgtttgggcaaagaatgatttgtgaattgggcagcattcaaaactggaaga

SEQ ID NO: 11582 - DNA, 201 bp, Homo sapiens
gttgccatctccttttcttctcaaaattaccagagaaagacttcctgaaactgattatttctcccaaatattttcttacctactgctctgttgaacaaaaygtgagactaagaagcttagtttggtttttagtaatccattttcaaactggcatgtaccctccaatgttaaataacttactgtccccaagcatatgcaaat

SEQ ID NO: 11583 - DNA, 201 bp, Homo sapiens
ctgtcacccaggctggagtgcagtagtgtgatcatggctcaccgcagctttgacctcccccgctcaagtaatcttcccacctcccaaagtgccaggattayaagtgtgagccaccacgcccagctacctatagcaattgtaatagaatgttgaagctaatacatttgtcatgctgcgtttgaaatacaaatacttgaggat

SEQ ID NO: 11584 - DNA, 201 bp, Homo sapiens
agttagacttttttaatcacaaaagtaatacatacttgtgaaaaacaatattaccctgagtcttaccgcttaaactactgctctaaacttgtgtgtatatwcttaaattaacgcgataatgtcatgtatttataattattatatatgccaattttagtactttttaatgattgtgtagctaaaatataattattggaaaaa

SEQ ID NO: 11585 - DNA, 201 bp, Homo sapiens
attcaagcaccttggcattcagtatggcatttaatgttcattattttgtgctctgtttttgaagggaggagaaatttacttcttattcaagaagtaatttrtgacagtgttcccacaagtgatttagctgtcattagcaagttctagaagagtactgcagcaaacattttaacattcttttatgtcatgacaagagagttc

SEQ ID NO: 11586 - DNA, 201 bp, Homo sapiens
agtaatttgtgacagtgttcccacaagtgatttagctgtcattagcaagttctagaagagtactgcagcaaacattttaacattcttttatgtcatgacargagagttcatactagttgtggggagtcgattgtggctgcacaagctcatgtctcagtgccaagaaaagctaagccgaaaagctgcaccgaggcagtcatg

SEQ ID NO: 11587 - DNA, 201 bp, Homo sapiens
agttctagaagagtactgcagcaaacattttaacattcttttatgtcatgacaagagagttcatactagttgtggggagtcgattgtggctgcacaagctyatgtctcagtgccaagaaaagctaagccgaaaagctgcaccgaggcagtcatgcctggctcaccgggatatctagccccaagaggccagcacaggctcgc

SEQ ID NO: 11588 - DNA, 201 bp, Homo sapiens
ccactggggaatcttagaatatatccactgcagataagagagactactgtaattctgacattagacattcactaatcatctgcctcacaattttcttttgytgacatttacccttgcactctaggagagtttctgaagtttgccccccacatattttatttctaaattctgctctttgaaacttctaatacaggtttaaat

SEQ ID NO: 11589 - DNA, 201 bp, Homo sapiens
aacattatatcatacaataataatatacccttcattatcttattttagatttatgagctgaattacctaagatcttaggtcccaccaaattgtctctgaaragattatattttattgcttgtggaatcagagtaaaatactaacaaaatattgacggaattgaatggatgttcagttcacttcagcacagatcataagcac

SEQ ID NO: 11590 - DNA, 201 bp, Homo sapiens
attgtctctgaaaagattatattttattgcttgtggaatcagagtaaaatactaacaaaatattgacggaattgaatggatgttcagttcacttcagcacrgatcataagcactagaaacctcatggacagatggattaaatattattccagaaataacatgtttaaagttaactttttttattcttcagactttcttagc

SEQ ID NO: 11591 - DNA, 201 bp, Homo sapiens
acataacaaaatacataatggcttgtacattataaaaatagttcatttgtgagagcaaaatctcatggcaaatttacatcatagtcttttattttcaagtrtcattattacagaatgcttagtaaatgtgtagagcattgtattagtaccaaaacaaatttaaaactctctgtttctcatttttcaggatatggcatgaga

SEQ ID NO: 11592 - DNA, 201 bp, Homo sapiens
agcaacctcaggactaaaaagacttgagctggactaccttgaggggttccacttgagatgacacacggaaactgagtaatcagaaaaaagaacaacaacarcaagcaactcactggagtgtgctcaccatagtgggtgttattaagggcctagaacatgggacatttcattcagtatgtgaatttatttatttatctattt

SEQ ID NO: 11593 - DNA, 201 bp, Homo sapiens
ttttataattgtatacataataaaactcatagaaaattttcagcagccactaagtcttctcatgtgtaccaaccagacccactggggttgccctgcagagktcagtctgttccattgctacctgggcaaggactttgggcctctccctttagagccaggattttcaacctgtgggtcacagtcctcaggatatgttgtaac

SEQ ID NO: 11594 - DNA, 201 bp, Homo sapiens
aaatatgaataatatgtttttatttaatgaagtgtttttctaggacatgatttttaataaccagatgatatttcatcctatggctctcccataacgtaacsccctattatgggatgcagtataggtaggtaagagattggagtctggagcagatatcctgccttttactaactgtcaccatggccaagtaatttattcctt

SEQ ID NO: 11595 - DNA, 201 bp, Homo sapiens
caaagtatcatttctgtgctagaagagagaatataatttcttaataatgatgtgaatgatttaaaacctagtaaaaccatttattgtataaatcttcttgkcatataataagcgttaaataaatattaattattatgatgactatctgcagataatattaaacttttgaacatactgtgagtaaaaacgtagtgctcccac

SEQ ID NO: 11596 - DNA, 201 bp, Homo sapiens
attttcgtgtcactcagagttctgactgctctccaagtccctgatggtgcccaaaccaataatcagctgagaagctctaacgctaaataccatgccacttkaagacccgtgccttttaaagaccttttcaaagctctctgctaccagtcaataaaaatataaaaatcattgaaagaccatgaatcgtaaatacagggagtt

SEQ ID NO: 11597 - DNA, 201 bp, Homo sapiens
cctcctccttgtcggtaacactgttactgccccttccgccgggaaatgtatctggtgaccggacgcgtagggttacaaaacaagggatttgtgtggcccgrtacaagtggcccgagacaagtggcccgagacaagtggcccaaaagaaggaaagcagcagctatgtcagtttggtttggcacctttatctctagggttgga

SEQ ID NO: 11598 - DNA, 201 bp, Homo sapiens
taacactgttactgccccttccgccgggaaatgtatctggtgaccggacgcgtagggttacaaaacaagggatttgtgtggcccggtacaagtggcccgakacaagtggcccgagacaagtggcccaaaagaaggaaagcagcagctatgtcagtttggtttggcacctttatctctagggttggagatagatctcctcct

SEQ ID NO: 11599 - DNA, 201 bp, Homo sapiens
gagacaagtggcccgagacaagtggcccaaaagaaggaaagcagcagctatgtcagtttggtttggcacctttatctctagggttggagatagatctcctyctccccagccgtgccgccaccctgtgatgacctccgttttagagcgtgagctcactctgacctttctgcgtacctgatacatgctgggtgtggcgtggca

SEQ ID NO: 11600 - DNA, 201 bp, Homo sapiens
ggtaaccagcatttttatttttcaggattcttccctttcatatgttccatctctttatttttctgtgctgcattgtgattaatggcctcagatctatcttscagtcgcttaagtctctatgcagttatgtgtagtttatattttcacctatttttgatttggggcttttattttttcttttgtgtctttgatttttaaaat

SEQ ID NO: 11601 - DNA, 201 bp, Homo sapiens
aattcaattcctagttcccaactgttatatctgtttctgatatccccgtgagtcattctgtctcagccttgctcaccagaggacttagaattccctcccckttaggttacttgggaatttctcttctttaaagcttacctatctattttattttttatgttaaattttattcagtattctcatgtctggaacaaaatggag

SEQ ID NO: 11602 - DNA, 201 bp, Homo sapiens
ctttcttttaaccaaatgtaagtgtgaagagacagagattgtcaccaggaatagagcactaatgtacagcaatagacggtagaaaatggtggtcctttcamtgagccactacaaagccatcttgttttaaattacctaaaagtgattctccatgtctgggaattttagaattacgtgagaggcttacagctttttaggcca

SEQ ID NO: 11603 - DNA, 201 bp, Homo sapiens
tccatgtctttcttagaaaagccccttgtgagcagccttgttttgttgcggttgtcttacaggaagcagctcagggttttgcgtatatgtgttttattttkaagttgtacaactcctggttgatgacagtcataacgtaaatgacctaaagtttaaattgcgttattctaatcagttttctgacctctgctgtcaacagaa

SEQ ID NO: 11604 - DNA, 201 bp, Homo sapiens
tttttctcttgtacatctagcagagctgtttgtaaaagttaaaaattagttattgatttgtcagattttttaatttagaaaatgttttgtatttgttttgyggtttgcctaaattgctctaacatttggtatctaatttgactctcacagtaaccctgtagggtgcatggtattgccatgataagaaactagatgctcagc

SEQ ID NO: 11605 - DNA, 201 bp, Homo sapiens
acgtgaagggattctaatgtgtggtagacaaagaagtaaggagctgagggaatgattgttccatcagctacatgtagtggcgcaatggatgagcccgcatyctaggagcccccttcctctgcccctgcttctatagaagcccttaccttcccatcctggctcacttgccaggacctgctggggagctcagaaccctcccta

SEQ ID NO: 11606 - DNA, 201 bp, Homo sapiens
ttacagtattaattctttagaggtattttggtgtatatgagcactgatggttgtgctttaaaattggcagcccgttgatgttagcaggaccagccaagtgrcaggcactgcagtagagggacctgggttagaagtcagatggccaagctcccaggcctggcgtacacagctcggagggtcctcgtgcagagagtgctcctt

SEQ ID NO: 11607 - DNA, 201 bp, Homo sapiens
ttccatttttctcacctgtttaaagcctgtatattaaagcttgtattaaactttatcactaaggtgctttctctttgaagatctatggattaacccttcamaattttttattataaatgttatccacatcaatgatacgaaattcaaacaatgcaaaagagtatacaatgaaagtgtattcattcattcaccagagattac

SEQ ID NO: 11608 - DNA, 201 bp, Homo sapiens
ctgaagtggctctggaccaggcattagggacacagtgaggtccatcttacaggcttccttccctgggtgttgttggcagggtagcagctgtttactgacartcagttacttaagaaggcagctcatgccagatggaatccctgggttctaaaacctaatggactttaagtgttaaggaggtttaaatgagtctgggtagga

SEQ ID NO: 11609 - DNA, 201 bp, Homo sapiens
ctagaatagtactccaaaccatacaagtatccacacacacatcccagtacttagatgactggatcacaggggctgattgcaccactgcaagcatctcaagsaagggtgttccttgaatagttactatttatcacctcttgccttctaaggaagagcctagatgagacataatgcagtagaattccctctgtaaccttgtct

SEQ ID NO: 11610 - DNA, 201 bp, Homo sapiens
ttgagttttttaattgaagatattcctctaagtacatttctctacattgaaatgagaatataaattattaattcttgctaaaatggtcttactattctgakcacttaaaaataaatataaaaatgaaagattatactaaatgaacataaaaatatactggttatttcggatgctttcccaagttgttttttctgaaatttg

SEQ ID NO: 11611 - DNA, 201 bp, Homo sapiens
cattctgcctctgcatggaggtgaaccccaggttgtgtacggcagcacaaatgtttctcttcaataaggtgctgcattttattttgtcaagcacttaaagsaagtactaagacaagaccacaaggtttcctgtggaaaagcacagatatttgagcccaggtacttcaggcacaggtgagggtgaaaggtgaggcttgtctg

SEQ ID NO: 11612 - DNA, 201 bp, Homo sapiens
tggctcatgtgttatctgtgtacatttgtgaaaaacaaccagtaatttagagacatacgtgtatttgaaaatattattcagatgaaatactgaatttttcmttattctgataatcaccattctcagagactgctgacagggttactattgacctgataccacatgtctacttctgtgatcctaaagagtgggcctgagtgg

SEQ ID NO: 11613 - DNA, 201 bp, Homo sapiens
tgaaatactgaatttttcattattctgataatcaccattctcagagactgctgacagggttactattgacctgataccacatgtctacttctgtgatcctwaagagtgggcctgagtgggcctaagcgggcttttcctgaaaaaggcagaatgttttagttggaattttgttcttgttcttgtttgaaagtattacaagtt

SEQ ID NO: 11614 - DNA, 201 bp, Homo sapiens
gctgagcatgtgccaaacaatggttttcatacttcgtatagattcacttatctaatatctccaaggagaagtgacttgctaaagcctcaagcagccatgcrtgtctcaactgttatgcaaaccttggcagtcagagcctgtgctcttcctgtgctttgttccctgagtttggataccttcaaatgggaaatggtccccttt

SEQ ID NO: 11615 - DNA, 201 bp, Homo sapiens
cacttatctaatatctccaaggagaagtgacttgctaaagcctcaagcagccatgcatgtctcaactgttatgcaaaccttggcagtcagagcctgtgctyttcctgtgctttgttccctgagtttggataccttcaaatgggaaatggtccccttttatcttaaacccaacaacttcacccatttagtttctgccagtct

SEQ ID NO: 11616 - DNA, 201 bp, Homo sapiens
ttattttccatcctcaagatttaagtataatggactagaacttgttttgatttctcgatatttaccaccctcagtttatccctattcctaattcctaaaawtatattttccttggtattaaaaaaaagacatgccagccaggcatggtggctcacacctgtaatcccagcactttgggaggccgaggcaggcggatcatct

SEQ ID NO: 11617 - DNA, 201 bp, Homo sapiens
cacagttctggaggctggaagtctagaatcaaggtgtcagcagtgctggttccttctgagggctgtgagggaaaggtatctttgaggcctattcttggctwatagatggccgtcttcttcccgtgtctctacacaccgtcttccttctgtgcttctatgcatatctctgggtccaaatttcccctttttataaggacgcgc

SEQ ID NO: 11618 - DNA, 201 bp, Homo sapiens
tgaattcttagtacccgacttagtgggtcctttacatcctagatagtctgatgtgatgagaaggctcaggaaggtcactgtcagcctgtaggagtgtccaytgccaccccagcataccccagaatagagagctatctgtggaaaaccacacaatactccagagaggaaacccatgcctacttggtattcccatcatctacc

SEQ ID NO: 11619 - DNA, 201 bp, Homo sapiens
tggtttgtccctgcctggcttcctaagtagtgaccatgtgttcatttaaattcccacagatttaaatgtttcgtttattaacagttcttacaatagatccyaaaactcagaaggaacaatttggggataatttcttttctaactgctatatggataaaagcaccataggtcttctgaggggtagatatgaatgtacgaggg

SEQ ID NO: 11620 - DNA, 201 bp, Homo sapiens
tgttgctgttgtttttgattatggtgaggatggtagactaactcctgtcattacatttgtcatttacttttgaaatcatgcatataaacacatgttggaawatagttacaattctaagttatgaaacctcatatccaaaaaaactaaaccgtgttataggaatgatatccacctcttcactctaggttggagaattggggt

SEQ ID NO: 11621 - DNA, 201 bp, Homo sapiens
acacttggctgatacctgtagctcctttccatatattttaaagatgatcttcctcataaatcattactagactataaatttctaggtaaaatttattgcayactagaaactgatgtcaagagggcccttaagtcagattaagctagcacttagagttccatcctgatcaaattctctaatgattctattttgccttaagtt

SEQ ID NO: 11622 - DNA, 201 bp, Homo sapiens
gcatgctttgacttatttactatttagcaatccttaggtattcaagagaatcatgttcacaccatataatgtagcggagtgtcttgttggtctaccattaytcagtcttattaaccaaatatttctaaacttattgagagtacttgtgtctttcctcaggaatctaaggccgctgctccagctcctgtgtcggaggctgtg

SEQ ID NO: 11623 - DNA, 201 bp, Homo sapiens
tattaaggaaacccagagacctgagttgtagttgtgaatttgataatatcaaatactacagaaatagaagttttagtccttactcctgtttccagattcckttgttcttaagtctgcttcttctcctaggttttctttaactgtttcagtaatttcttaagcaagaggttggcaaagggcacaggtttggggaagcagtgg

SEQ ID NO: 11624 - DNA, 201 bp, Homo sapiens
cttcattaaaaaagaaaagtcctggccatgaaccattaagttgattcttatgacctactaatgtacagacgattccctttattttcccttgacaccattcrtcctctgtgttcaccagtgtgattttaaataccagcatggccagagttcattacatttgggggagtacatttcattttgaacaatcggaccacaggtaga

SEQ ID NO: 11625 - DNA, 201 bp, Homo sapiens; identical to SEQ ID NO: 6157

SEQ ID NO: 11626 - DNA, 201 bp, Homo sapiens; identical to SEQ ID NO: 6158

SEQ ID NO: 11627 - DNA, 201 bp, Homo sapiens; identical to SEQ ID NO: 6159

SEQ ID NO: 11628 - DNA, 201 bp, Homo sapiens; identical to SEQ ID NO: 6160

SEQ ID NO: 11629 - DNA, 201 bp, Homo sapiens; identical to SEQ ID NO: 6161

SEQ ID NO: 11630 - DNA, 201 bp, Homo sapiens; identical to SEQ ID NO: 6162

SEQ ID NO: 11631 - DNA, 201 bp, Homo sapiens; identical to SEQ ID NO: 6162

SEQ ID NO: 11632 - DNA, 201 bp, Homo sapiens; identical to SEQ ID NO: 6164

SEQ ID NO: 11633 - DNA, 201 bp, Homo sapiens; identical to SEQ ID NO: 6164

SEQ ID NO: 11634 - DNA, 201 bp, Homo sapiens; identical to SEQ ID NO: 6166

SEQ ID NO: 11635 - DNA, 201 bp, Homo sapiens; identical to SEQ ID NO: 6166

SEQ ID NO: 11636 - DNA, 201 bp, Homo sapiens; identical to SEQ ID NO: 5849

SEQ ID NO: 11637 - DNA, 201 bp, Homo sapiens; identical to SEQ ID NO: 5849

SEQ ID NO: 11638 - DNA, 201 bp, Homo sapiens; identical to SEQ ID NO: 6170

SEQ ID NO: 11639 - DNA, 201 bp, Homo sapiens; identical to SEQ ID NO: 6170

SEQ ID NO: 11640 - DNA, 201 bp, Homo sapiens; identical to SEQ ID NO: 6172

SEQ ID NO: 11641 - DNA, 201 bp, Homo sapiens; identical to SEQ ID NO: 6172

SEQ ID NO: 11642 - DNA, 201 bp, Homo sapiens; identical to SEQ ID NO: 6174

SEQ ID NO: 11643 - DNA, 201 bp, Homo sapiens; identical to SEQ ID NO: 6174

SEQ ID NO: 11644 - DNA, 201 bp, Homo sapiens; identical to SEQ ID NO: 6176

SEQ ID NO: 11645 - DNA, 201 bp, Homo sapiens; identical to SEQ ID NO: 6176

SEQ ID NO: 11646 - DNA, 201 bp, Homo sapiens; identical to SEQ ID NO: 6178

SEQ ID NO: 11647 - DNA, 201 bp, Homo sapiens; identical to SEQ ID NO: 6178

SEQ ID NO: 11648 - DNA, 201 bp, Homo sapiens; identical to SEQ ID NO: 6180

SEQ ID NO: 11649 - DNA, 201 bp, Homo sapiens; identical to SEQ ID NO: 6180

SEQ ID NO: 11650 - DNA, 201 bp, Homo sapiens; identical to SEQ ID NO: 6182

SEQ ID NO: 11651 - DNA, 201 bp, Homo sapiens; identical to SEQ ID NO: 6182

SEQ ID NO: 11652 - DNA, 201 bp, Homo sapiens; identical to SEQ ID NO: 6184

SEQ ID NO: 11653 - DNA, 201 bp, Homo sapiens; identical to SEQ ID NO: 6184

SEQ ID NO: 11654 - DNA, 201 bp, Homo sapiens; identical to SEQ ID NO: 6186

SEQ ID NO: 11655 - DNA, 201 bp, Homo sapiens; identical to SEQ ID NO: 6186

SEQ ID NO: 11656 - DNA, 201 bp, Homo sapiens; identical to SEQ ID NO: 1084

SEQ ID NO: 11657 - DNA, 201 bp, Homo sapiens; identical to SEQ ID NO: 1084

SEQ ID NO: 11658 - DNA, 201 bp, Homo sapiens; identical to SEQ ID NO: 6190

SEQ ID NO: 11659 - DNA, 201 bp, Homo sapiens; identical to SEQ ID NO: 6190

SEQ ID NO: 11660 - DNA, 201 bp, Homo sapiens; identical to SEQ ID NO: 6192

SEQ ID NO: 11661 - DNA, 201 bp, Homo sapiens; identical to SEQ ID NO: 6192

SEQ ID NO: 11662 - DNA, 201 bp, Homo sapiens; identical to SEQ ID NO: 6194

SEQ ID NO: 11663 - DNA, 201 bp, Homo sapiens; identical to SEQ ID NO: 6194

SEQ ID NO: 11664 - DNA, 201 bp, Homo sapiens; identical to SEQ ID NO: 6196

SEQ ID NO: 11665 - DNA, 201 bp, Homo sapiens; identical to SEQ ID NO: 6196

SEQ ID NO: 11666 - DNA, 201 bp, Homo sapiens; identical to SEQ ID NO: 6198

SEQ ID NO: 11667 - DNA, 201 bp, Homo sapiens; identical to SEQ ID NO: 6198

SEQ ID NO: 11668 - DNA, 201 bp, Homo sapiens; identical to SEQ ID NO: 6200

SEQ ID NO: 11669 - DNA, 201 bp, Homo sapiens; identical to SEQ ID NO: 6200

SEQ ID NO: 11670 - DNA, 201 bp, Homo sapiens; identical to SEQ ID NO: 6202

SEQ ID NO: 11671 - DNA, 201 bp, Homo sapiens; identical to SEQ ID NO: 6203

SEQ ID NO: 11672 - DNA, 201 bp, Homo sapiens; identical to SEQ ID NO: 6204

SEQ ID NO: 11673 - DNA, 201 bp, Homo sapiens; identical to SEQ ID NO: 6205

SEQ ID NO: 11674 - DNA, 201 bp, Homo sapiens; identical to SEQ ID NO: 1081

SEQ ID NO: 11675 - DNA, 201 bp, Homo sapiens; identical to SEQ ID NO: 1081

SEQ ID NO: 11676 - DNA, 201 bp, Homo sapiens
tgaggcacaagaatagcttgagctcaggaggtggaggttgcagtgggccaagatcgcaccactgctctccagcctgggtgacagagtgagactcagtctcaaaaaaaaaaaaaaaaaaaaaaagaactggaaaaatgtaattcatgaagttctaaaaaagttggccttttattataagtgatttttatttatgtcattata

SEQ ID NO: 11677 - DNA, 201 bp, Homo sapiens; identical to SEQ ID NO: 6247

SEQ ID NO: 11678 - DNA, 201 bp, Homo sapiens; identical to SEQ ID NO: 6248

SEQ ID NO: 11679 - DNA, 201 bp, Homo sapiens; identical to SEQ ID NO: 6249

SEQ ID NO: 11680 - DNA, 201 bp, Homo sapiens; identical to SEQ ID NO: 6250

SEQ ID NO: 11681 - DNA, 201 bp, Homo sapiens
taagagaaccttgttacagttctcatgacgttggctttttaattaagaatattcttcagtgaaaggtgggctggctgccaggcccatctctcagtcctcaygtttggctctgtcttaagatatcctcatatgttcctccctactttgtgttagagacattttgagtctctcatttctgtggagattgaggcttgcagttgg

SEQ ID NO: 11682 - DNA, 201 bp, Homo sapiens
gagagaatttatttatgtttgcttgtttataccaattgttatgaatttttcaattctttctcagatgtagaggaattacaggaccaaaagttgcatggacyaacaagccaaagataaaataactagagaggaggaaaaagaaaaatgaaaacacttaacatcagcaactttaaatgcagtagaacaaataagtctttccaa

SEQ ID NO: 11683 - DNA, 201 bp, Homo sapiens
taccaaagaggtttgactgctaggttttctagatggctacatttctgtgtggagtatgagcattcaggaaagagggggtctttcagggacataagcttgcyctgtttcagatgcatgacacaagtggttcaccaattgtgcttttcaatatagttccattggcttcgattaggatggagattctgcctagatttttggcat

SEQ ID NO: 11684 - DNA, 201 bp, Homo sapiens
tgattttacatattccagtctcacttcagctgaactacattggtcctttgtggactaagtaatccaggcagctctgagagcaagccagtctttaggggaasagatcatacccacaagaaagttgagggagcctccgttaagttaaaaaacatttcgtttattagtaagtcattttcagcatataaattaagtttaaacagt

SEQ ID NO: 11685 - DNA, 201 bp, Homo sapiens
actgctctccaagtccctgatggtgcccaaaccaataatcagctgagaagctctaacgctaaataccatgccactttaagacccgtgccttttaaagaccytttcaaagctctctgctaccagtcaataaaaatataaaaatcattgaaagaccatgaatcgtaaatacagggagttaattaacatttggaaccaacataa

SEQ ID NO: 11686 - DNA, 201 bp, Homo sapiens
tgtaactcatagcattatcccttaaggaattacatacccatgcatcatttagaaaagctgggggtaatagcataacttgaagccttttattacacagttaycatggcacacacaggcaaaataatattctcccaacacattctgaaaaggcgtgacagagtggtagatagaattggaagtgagaactagtgctagttttct

SEQ ID NO: 11687 - DNA, 201 bp, Homo sapiens
tccttgagtgcccaatggcacaagtttggaatttatttttctcatgcatatgcatttttacactcatggctccagccagaaagaaagctgccttaccattrttctggacaggtgggcagttgtcaaggcttatgtttgtggatgatcagttctgagtagcttctggttttaagctagtaactcagcacagggcctgtagcc

SEQ ID NO: 11688 - DNA, 201 bp, Homo sapiens
tacgggcagggacatgcctactggttttacctctgtgtccccagcacctgacacagtacctggcacagagcatattctggataaacacctgggggagccartgaactctggtaaaatcttggacatgagattccatttttctcacctgtttaaagcctgtatattaaagcttgtattaaactttatcactaaggtgctttc

SEQ ID NO: 11689 - DNA, 201 bp, Homo sapiens
cttgtctcataggattattatgaagataaagtgggttgacacatgagaggtgattaatacacattagttattatggtcatcattattatattcagcacaaycactacaaaaataaattcagcaattactgatttaaatatagattgcattataagctgcttgtgtctgtgagcatacattcttaattgtagtgtaggttct

SEQ ID NO: 11690 - DNA, 201 bp, Homo sapiens
tccaattccaatgagacatcaagaataaggtgtctgctgaactcagcacctagatggcttagggatgagaatctttcctaagaggctggctgggtttatcrtgacagtcttacctcagttggtggagctagttaacagttacacaggaggctagcttctgttactttcctgacccatgactgtccagaatgaatgccattc

SEQ ID NO: 11691 - DNA, 201 bp, Homo sapiens
aaatcttcaggttttaggaaatgattgacagaagtgggcaaagacaaagtaaaatctaagataacctggtgcttctgagtctgattgcaggaggttggtarccacacggtaagggaaaggaggcccctaaggtgctcattgtcaggtttgtgcaagtgcagagttggcacctgagaatgagtgcctttttaaattgtgagc

SEQ ID NO: 11692 - DNA, 201 bp, Homo sapiens
ggttgcagcgagctgagatcgcaccactgcactccagtttgggcgacagagcgagactccatctcaaaaaaaagagtatctagtgttctgtcatttgcatrgaaacaggatgatgtcagtatcaacatcaacacagcaactaaaaattagtatcggggatggaaattgtcttttggcagctgcattataacattgagttag

SEQ ID NO: 11693 - DNA, 201 bp, Homo sapiens; identical to SEQ ID NO: 6252

SEQ ID NO: 11694 - DNA, 201 bp, Homo sapiens; identical to SEQ ID NO: 6253

SEQ ID NO: 11695 - DNA, 201 bp, Homo sapiens; identical to SEQ ID NO: 6254

SEQ ID NO: 11696 - DNA, 201 bp, Homo sapiens; identical to SEQ ID NO: 6255

SEQ ID NO: 11697 - DNA, 201 bp, Homo sapiens; identical to SEQ ID NO: 6255

SEQ ID NO: 11698 - DNA, 201 bp, Homo sapiens; identical to SEQ ID NO: 6257

SEQ ID NO: 11699 - DNA, 201 bp, Homo sapiens; identical to SEQ ID NO: 6257

SEQ ID NO: 11700 - DNA, 201 bp, Homo sapiens; identical to SEQ ID NO: 6259

SEQ ID NO: 11701 - DNA, 201 bp, Homo sapiens; identical to SEQ ID NO: 6259

SEQ ID NO: 11702 - DNA, 201 bp, Homo sapiens; identical to SEQ ID NO: 6261
  misc_feature 174: n = A,T,C or G

SEQ ID NO: 11703 - DNA, 201 bp, Homo sapiens; identical to SEQ ID NO: 6261
  misc_feature 174: n = A,T,C or G

SEQ ID NO: 11704 - DNA, 201 bp, Homo sapiens; identical to SEQ ID NO: 6263

SEQ ID NO: 11705 - DNA, 201 bp, Homo sapiens
ctccagcccgggcgacagagcaagactccgtctcaataaataaatgaataaataaataaataagtataatgacctcttcatataccaatcattggtgtcartaattgtcaacattgtcctaatcttgttttatctgttaaccgtcacagctaccagcacagacacgcgtgcacacacacacacacacacacaccctttcaa

SEQ ID NO: 11706 - DNA, 201 bp, Homo sapiens
aaaagagcaaaattacttctcagggaatgtttataggtttgtgggaacatggtcattcaatcaagaattctttgttatggtcctaccacacatctaggaamaaaaggatataacttaccctgtgattaggaaggcaagatgtaagtttataaagtaatcagtaagcaagagagtgtacaataaagtgctaatttgtttgat

SEQ ID NO: 11707 - DNA, 201 bp, Homo sapiens
tttgcctaaaaaggaagttttcttttccaatatggtcaagtggatgcaaagccaatactaatatggtcattctggccaattataactgggaaacttaaatrttacaccttggatgtacaggatgtacaggcattattggtatgtaacaactgacggtagatagttaagtatataatgtctggattataatgtctctcatct

SEQ ID NO: 11708 - DNA, 201 bp, Homo sapiens
gcatcttttttctttgtttgcttattttgtttactgaaatgctgcatatcttgatttttaagcagaaatagcaaaggaacaccattatagggcctagtctraaaatgataaataatgtgctttgtgatagataaatcttttccaattaaaaaaagacccatcagtgtgtgtggcatttaagtatatagaaaaccattattc

SEQ ID NO: 11709 - DNA, 201 bp, Homo sapiens
tcccacttctcccaggaccttgtcctttagatcttttgattattccttttttttttcactctttatttcatgactcctctttagactacatattagctcartcttcatcataaactgttttaaagcaattcctttgaaactgctcaagctccaattccatctctgcctctaaccctcactaccaaaattcctggttaaaat

SEQ ID NO: 11710 - DNA, 201 bp, Homo sapiens
tcacagagtcatgaagtctcagggtaaaacatgtggcttcactcagggagccttttctaagattttaagtgacagtgacacagcaactctttgcctggctyttggaacttcattgttattttgaaaattttaaagactcgagttctgattgactcagtaaaaaattttttctctgaactacaatagatatacaaaaaagta

SEQ ID NO: 11711 - DNA, 201 bp, Homo sapiens
attaatagtaaaattaaatagcacataactgaaaacacccttatcctataggaaataggacacccttaccctataggaaacttttgcttagattgaaatayaagcagcagtgctcatatatttacagcagtttcaaattcaaatgaatcctactttaaaatgtgttctatctattccactgaattgttatctgatgggaag

SEQ ID NO: 11712 - DNA, 201 bp, Homo sapiens
gacctacgcaagttacctgcgtgaacgttttaggctcttgagtccagctttatgtggtgcttagcactgcaccatgtacaatagaagtgagcaaacattcmcttatggtgtccgtgagggtgaactggcagatgttagtgacatttgaaactcatgatcttgataatagccatgcagagatacttagctctgtcaaccttt

SEQ ID NO: 11713 - DNA, 201 bp, Homo sapiens
tgtcttagactaaaccacaagacatgatttctgctggtggagagagtgttgctggtatcactgcaatatctggcaagccgggtgacaaggtgagcacacasaagcagacggaaacgtgggcctctgtgcttctcaagtttcttttatgagaaacgtatgctcaaataacctatcatctggcaaaactgaacactgcttata

SEQ ID NO: 11714 - DNA, 201 bp, Homo sapiens; identical to SEQ ID NO: 6265

SEQ ID NO: 11715 - DNA, 201 bp, Homo sapiens; identical to SEQ ID NO: 6266

SEQ ID NO: 11716 - DNA, 201 bp, Homo sapiens; identical to SEQ ID NO: 6266

SEQ ID NO: 11717 - DNA, 201 bp, Homo sapiens; identical to SEQ ID NO: 6268

SEQ ID NO: 11718 - DNA, 201 bp, Homo sapiens; identical to SEQ ID NO: 6268

SEQ ID NO: 11719 - DNA, 201 bp, Homo sapiens
taatatggtcattctggccaattataactgggaaacttaaatattacaccttggatgtacaggatgtacaggcattattggtatgtaacaactgacggtasatagttaagtatataatgtctggattataatgtctctcatctccatatttataaaaggtttagaaaggaaaacactgttaagaagccatgttataagagg

SEQ ID NO: 11720 - DNA, 201 bp, Homo sapiens
agatggaaggaccacatcttcctaacaagaaaaaacacaaaaaacaggtgatgttgttcattgtactagggcatctctgtttactaacggttacatcaccygctcagcatgtgctaataactgcaattcacagtcttctgttaacactgagatcccatcatggactttctgtaggcttagctgcccatcagccacattctg

SEQ ID NO: 11721 - DNA, 201 bp, Homo sapiens
atatattttgtattatagtgatttggtattattattttgttggtttttcaaatagacttgtaggaacttggatgcatggatggcttgagaagggcatcagrttggtctaggggatgcgctgtccgtccttctcctactgcccagcaataaccagctgtgactgcagggcagcaggctctgctgtctcccagacaggcagct

SEQ ID NO: 11722 - DNA, 201 bp, Homo sapiens
tgtgatggattacaggtgtgagccactgtgcctggtcctgttctcttcattaaaaaagaaaagtcctggccatgaaccattaagttgattcttatgacctmctaatgtacagacgattccctttattttcccttgacaccattcgtcctctgtgttcaccagtgtgattttaaataccagcatggccagagttcattacat

SEQ ID NO: 11723 - DNA, 201 bp, Homo sapiens; identical to SEQ ID NO: 6270

SEQ ID NO: 11724 - DNA, 201 bp, Homo sapiens; identical to SEQ ID NO: 6270

SEQ ID NO: 11725 - DNA, 201 bp, Homo sapiens; identical to SEQ ID NO: 6272

SEQ ID NO: 11726 - DNA, 201 bp, Homo sapiens; identical to SEQ ID NO: 6272

SEQ ID NO: 11727 - DNA, 201 bp, Homo sapiens; identical to SEQ ID NO: 6274

SEQ ID NO: 11728 - DNA, 201 bp, Homo sapiens; identical to SEQ ID NO: 6274

SEQ ID NO: 11729 - DNA, 201 bp, Homo sapiens; identical to SEQ ID NO: 6276

SEQ ID NO: 11730 - DNA, 201 bp, Homo sapiens
ttgcccaggctagtctaaaactcctggtctcaagcaatcctcccacctcagcctcccaaaatgttggattacaggcatgagccactgcactgggcctacargtgctttttaaagcctccatgtacactgtggagaacaaagagtttttctcaaatggaaataagtcaaccttttcaacctgttttcacatgtgtaaaatag

SEQ ID NO: 11731 - DNA, 201 bp, Homo sapiens
ttgttctggaccccactcaaaactgacagcctttcaggttactcgataaatgggctggaataacaaacctaaatgaggaatgtgttgcctccaaaatccarataggcccactaggcattgtgcttctttcttggttgtaggaggggccaaatgcagcaacttatccttcacctcagaaagaatatctcaaccagccccaca

SEQ ID NO: 11732 - DNA, 201 bp, Homo sapiens
ggggtttcaccatgttggtcaggatggtctcgatattttgactttgtgatctgctcgccttggcttcccaaagtgctgggattacaggtgtgagccactgmgcccggccgtgatggttaattttatgtcgacttggctagacaatatacccagatatttgctcaagcattattctagatgtttctatgaagatattcttag

SEQ ID NO: 11733 - DNA, 201 bp, Homo sapiens
catgctatagcatgtatcagaattttattcctttttaaggccaaataatattccattgtatgtacatatgacattttttaaacgtttattttaggttcaggtacatgtgaaggtttgttataggtaaactagtgtcacaggggtttgttgtacaaattatttcatcaaccaggtattaagcccagaaccacatagttatct

SEQ ID NO: 11734 - DNA, 201 bp, Homo sapiens
ccaagaaccaaaattacaaagcaaaaagtaatcattagtacaatgattaagaaaaataaattttatctcctttcagtcaccataatttgaaaaaaaaaaaacattgaaaagtaatgaaaaactcaaatccacacataaaacatcacctgaatcattataattttcataaataaacataaaatatgtcctaaacaatataac

SEQ ID NO: 11735 - DNA, 201 bp, Homo sapiens
atgaaagttacggcgaaaaaggttgtgaatttattatccagcttaagattttaatgacaaaatgacataaaatattacttttgatgtgccttgacattttsctttattagaaaatattttcaaatagctaagtaacagcaccattagcaaaaatattgaattttgcagaatattactctcagtgtcacctggcatgggatg

SEQ ID NO: 11736 - DNA, 201 bp, Homo sapiens
gagatcactaaccaaggacaaatatcggggttgaattgatatgagaagtgcacatcctaaggactgaaagttttaagtagtgatagttggagagactagtrtgttgtcaacaaagaggaacatggattttgctctgctcggcaagggcccaactaattttagggaacctgaatgtgcaattgactaagttaacaaatccta

SEQ ID NO: 11737 - DNA, 201 bp, Homo sapiens
ctgccagcacagcagtctgaagttgacctgggatgctcgagcctggtggagggaggaacgactgccattactgaggcttgagtaggcagttttcctctcayagtgtaaacaaaaccacgaggaagttcatactggctggggtccactgcagcaccacaaagctgctgtagccagaatgcctttctagattcctcctccctg

SEQ ID NO: 11738 - DNA, 201 bp, Homo sapiens
agcgagacagaaccgttcactcccctggaaaggtggctgaagccagggaactaagtggtctagctcagtggatcccacccctagggagccctgcaatctargatccactggcttgaaattctcgctgccagcacagcagtctgaagttgacctgggatgctcgagcctggtggagggaggaacgactgccattactgaggc

SEQ ID NO: 11739 - DNA, 201 bp, Homo sapiens
aaatagatgcaatccatcattctcatatatcacattcaagtgaagtatctaacacatacagtagccccctccatctgcaactcttctttctgaagtttcakttacttgcagtcaaccatggttcaaaaatattaaataaaaaatttcagaaagaaacaatttataagttttttattgtgtgctgttctgagtagcatgatg

SEQ ID NO: 11740 - DNA, 201 bp, Homo sapiens
tttgagaccaatgattatcaatgatgatgtcatcagcaacaagtggccaggaatcacccaatccagacaagtccatgtgatcttcatgttctgctttcttstgcaaaggcattcatcttttacgtacctgatcaaacactgaggttctaataaaagtagcttctatggagtcttcggatcttagggaaatatcttcatcag

SEQ ID NO: 11741 - DNA, 201 bp, Homo sapiens
gagaacatgatattcacatagtatcaaaatgtcatcccattgattgattacttattaattataaaggaaaagcataacttcaaaatgaaaaaaaaaaaaaacttgacagacaccatcttaaccaggtaaccaaacatcacacaaaacgcacagaggcccctgatgtgatgtaatcaaatgtacacaacagcacttgtgcag

SEQ ID NO: 11742 - DNA, 201 bp, Homo sapiens
tacttcccacttagtgtctaaacagacatcaacccaaactggacattgtcgataagtaaggtatgtaaaatgataccaaacaggtgtaattcgttttaagrtaaacatgggttgtatcatgtggtgttaatctttacttctggggaatatcaagcctgggaaaaaaaataaaaattgaatgagctgtttcttccttcttcc

SEQ ID NO: 11743 - DNA, 201 bp, Homo sapiens
tgtgatggtaccttcaaaaagcagcaacaaaaacaactattgcaaagcattctttgaaaatctgtcatctatactgtgtaataagtatagagttttacaayataaaaacaattctggagatagatggcagtgacgcttgtacaacattatgaatgtatataatcccactgaacttaaaagtgattaacatggtaaatttta

SEQ ID NO: 11744 - DNA, 201 bp, Homo sapiens
actgtttttgtgagtataatttctttgtactgttctacgttgatactgaataaatacaaaattaaaacataaacacatatatgaagcataatgctaaaatyaatcaagtaactcatgttgtaacaaaccaatagcttaaataactgttcaatttcatgaattagtagaggatttgttttacctttctgcttgtattgatac

SEQ ID NO: 11745 - DNA, 201 bp, Homo sapiens
tgggggatgatagggagatgacgacaggagagatttattaaaggaggactatttattttctggccaatttctaatctaaatctaaattcccaagaaaaaaagacacgtcttccatgtaactgctacttagcagacatcaatttctgctgtcatttccagaaaagcaccatgatttagtgtgggactctaatatcagacttt

SEQ ID NO: 11746 - DNA, 201 bp, Homo sapiens
tacgcttatttcaacataacactggaagttccagtcaatgcaataagataagaaaaagaaataaaagtcatacatgtgaagaaggaagaaataacactgtmtttatttgaacataacatcttgatctatattgaaaatcttaaggaattcacaaaaagactacaagaactaataagtgagtccagtgaggtcacaggatac

SEQ ID NO: 11747 - DNA, 201 bp, Homo sapiens
ctctgggcatttttgaaaacaacattctcagattctatgcataatgattacctcgcttataataaaataccgcaggatattttctaaaatttcctattgawtaaaaaggtggacctggactgctgttcctgggaagatggagtagatacactcttccctcttcctttcactaagtacaactaaaaaccatgggtagtcaat

SEQ ID NO: 11748 - DNA, 201 bp, Homo sapiens
ctagtctatcaaatgggtaaacaaggaggaaaatggtgccaattatggagtatccatatttgctccaaatgaggaacattataacaattataaaatgaaaragttgacttatggagctatcgagaacccttatctggatgtgtctaagcagagattggtaaagattgtcttgttttttattctttaaaaatccatgtaatt

SEQ ID NO: 11749 - DNA, 201 bp, Homo sapiens
actacattttaagtagagaatgtgataaatcagaaaagcgggacaaggaacgataaagggtctgaaaatcacatcctacgaggaaaggttgatgtctagcytgcaaaagaaggtaaaccgaattgggagcttcatgtctataagcatataagaggcgtccacatctctagtctatcaaatgggtaaacaaggaggaaaatg

SEQ ID NO: 11750 - DNA, 201 bp, Homo sapiens
tcacaaacttcacaaaaatgtgtccttccttctggcatgaactttgagaaatacttctgccagtgtttatacagttttaggagggcttcgtggtttatgawcagattagtctattttccccctagtgcatggctcccaattccacatgtggaaatgtttctctgagagcagtaatgagtgaagcctgtgcttcaagagttc

SEQ ID NO: 11751 - DNA, 201 bp, Homo sapiens
tcctggggctggagattagttagacagaatgaacatttacgaatcctcataaataaataattatattggagctgcccatcttaaacttccttcatccaaaratgaattatgtaatagcttgacctggaataaaggtcaaaagctgattttaagggaagaagagtggcagagtagagctagacagatcagagatctaggaaa

SEQ ID NO: 11752 - DNA, 201 bp, Homo sapiens
tctctgggtttcagccaagtgaagaaggggaggggcctcctcagcagagggactagaaagtgccaaggcaggagtgaagcaacatgatgtgcctggaaaayctctagaaagtgaagtgtttatgacaatcaggggcagtagataaggttagaaggcagacaaggaagctctgctgaggatttaaaaattattctgaaagct

SEQ ID NO: 11753 - DNA, 201 bp, Homo sapiens
agtggtgtgtgcctgtggtcctagctactcaggaggctgaggcaggaggatcacttgagtcaagtggttcgatgttacatgagctgtaattgtgccactgyacttcagcctgagcaacagagcaacactccatctctaaaatatatatataaaataaaaataactctgaaaggcaaaaatctcataaatctagtttaaaac

SEQ ID NO: 11754 - DNA, 201 bp, Homo sapiens
ggaattgtctagccacaggttgtttacatgtggtctgagcattttcttaatgtgatcctgtacttaagtgtatataggttcagccagaaaagagaaagatraacatcaaattgttgcaatgccagaagaaaattatagggtgttcccatgtttgaaagatcactagttttcaccattggtttggagcaatgaattatccat

SEQ ID NO: 11755 - DNA, 201 bp, Homo sapiens
aaacaattagcatcaaagtttgagactttgggaccctggctataaaagtataatacttttttttctgtttctcatactttgaccaactttcagcagagaaygaaaagtatggaagctttaaaacaatctacagaaatgtgataacctgctgaatagccacaactagaagggggaagaaaagaagaaaagaaaacttctaca

SEQ ID NO: 11756 - DNA, 201 bp, Homo sapiens
gagaacactgaaggttggactagggatgcaaaagaatacaggcactaggaactaggaccgcctgtactcaccaccagtcacaggatttagggcagagataytgaaaagtaaccaccatcacattattctctgcccacattcttaccatatgggtactcaggatcactaaggaaagcatgcatataattagcctagaaagcc

SEQ ID NO: 11757 - DNA, 201 bp, Homo sapiens
ctagggcaaagagaggcagcccaaaaagccccataaccagctggcagagaccagcttgagagtcaagaggagaacactgaaggttggactagggatgcaaragaatacaggcactaggaactaggaccgcctgtactcaccaccagtcacaggatttagggcagagatattgaaaagtaaccaccatcacattattctctg

SEQ ID NO: 11758 - DNA, 201 bp, Homo sapiens
tgaattttcttttgcttgcaaacagggattcatatttcttattgacctttcctttgtggacaacttaaagctttttagcttcctcattatttgaaccataygggacaaggaagatttttttaaaattgattctaaccaaactacattttcaactcaaaccagattgatttcaatcattcctgtaagtctatccttactgat

SEQ ID NO: 11759 - DNA, 201 bp, Homo sapiens
tagtttcagaaggaatggcaccagctcctctttgtacctcccacagctcttacatcatgaatatccaagttaaattacgcctgatctctatatttttcaawcacattagtcaatacatttcctttagtttgtaagtcagccacagttgaattttcttttgcttgcaaacagggattcatatttcttattgacctttccttt

SEQ ID NO: 11760 - DNA, 201 bp, Homo sapiens
ccctctttttctattgtttggaatagtttcagaaggaatggcaccagctcctctttgtacctcccacagctcttacatcatgaatatccaagttaaattaygcctgatctctatatttttcaaacacattagtcaatacatttcctttagtttgtaagtcagccacagttgaattttcttttgcttgcaaacagggattca

SEQ ID NO: 11761 - DNA, 201 bp, Homo sapiens
atttttttctccaatgagaaattcctccagataacctattgagtatttgagtcctctgagtcctcctgaggcactagcacactcaattttttatattgatyaaattataaaacacaccatacatgcaatttgttagcttgactaagttttgttttgcttttgttctttttggttttgtttgttgttttcctgtttcctttt

SEQ ID NO: 11762 - DNA, 201 bp, Homo sapiens
tcctctccccacccctcatatcagcttacttttccaactaacaaaacaccagtcttgttgaaccatctattacaaacactggagcagaatagcaaagggawtttttaatcaaggaaaaacttgaggttaaattattactatcttgattatgtgggttgttcaaaagaactttaatttttttctccaatgagaaattcctcc

SEQ ID NO: 11763 - DNA, 201 bp, Homo sapiens
ttatatagttatacaataaatggcactgaatgaataaatcacaagacttgaagcgatgagagaggttttctaattcatcatcccaatttcaggtagactaycataattcagcacagaaacctttttcttgaggacctggagtatttatcgtgagtttgttcttggcctgtgcagtaagcaggcagaacagtcactctccac

SEQ ID NO: 11764 - DNA, 201 bp, Homo sapiens
gaccacaggagaacaggtgactcctcctcctcccagcatcaagaggatcactaggacagacaccacgttggaaagaagtaagaattgaaaggaagaagtcrctataataaggacttaaatttagaattcccggaatatttacctcaaagagaaatctgaaatcaaaatagactgtttaaatcagaggaggcaaagaaacca

SEQ ID NO: 11765 - DNA, 201 bp, Homo sapiens
ttttcctctgctgatcccctaccatcttctcaactcattcttcttaagaggccccagtgaaagtcagttccactagatgtgtgctgactcagtcaggccakccaacctcgattgagaactcacctgaatgcaggagccatgagccagtcagctcatctctgaagtgagagaaagaacagttcacatcttcgttaattagat

SEQ ID NO: 11766 - DNA, 201 bp, Homo sapiens
attttggtttcaagacctctctcccaataccaaaacctctaatgctcaagtctctgatataaaaaggtatcatatttgcatataacctatgcacattcttstgtttaagtcatgtctagattatgaaaaaaaaaacctaatacagtgtaaatgccatgtaaatagttacactatattgtttagggaatgatgacaaggaaa

SEQ ID NO: 11767 - DNA, 201 bp, Homo sapiens
aggattttggtttcaagacctctctcccaataccaaaacctctaatgctcaagtctctgatataaaaaggtatcatatttgcatataacctatgcacattyttctgtttaagtcatgtctagattatgaaaaaaaaaacctaatacagtgtaaatgccatgtaaatagttacactatattgtttagggaatgatgacaagg

SEQ ID NO: 11768 - DNA, 201 bp, Homo sapiens
cttccacttaacttcattaaatccaactgaacatacatttagtgtcttctaaatactacttgttatttagtcctgtgatgagctcagctacctgaggttgyaaaatgcttaactgtggagttgttggacaactaataattctgagagactcaagccaggctaagtggggttggcagggggtagtgggagggtcctcataga

SEQ ID NO: 11769 - DNA, 201 bp, Homo sapiens
agaagagatgaagagtgagagagagaaatgagaaatgaaaggagaattggtatggtttggatctgtgtccccacccaaatctcatgtcaaattgtaatccyccatattgtatttggggcctggtgagagtgagtggatcatggggatggaatcgtcatgaatggtttagcactgtcttcttggtgctgttcttgtaatagg

SEQ ID NO: 11770 - DNA, 201 bp, Homo sapiens
aatctatggggttaatcaatgtttcatgtaatttgtaataagaaacttcaaagcctttcaaataaatagtgagagagagatgagaactagcagattaaagraacaagtgtttaagaattcgtatgtattaaaggctcaagccatgtcaattctcaaactaaccaaaaaactaattcatgttagaaaatcagcacacacttt

SEQ ID NO: 11771 - DNA, 201 bp, Homo sapiens
agcatgatctctctgttggagcagtgtctgataaaaaaaaaaaaaaaagaaaaaacagctaaaacagaagatttatgctgtaagactgagagtcttataayggaattctgaaaatgtccagacttcaataaaaaaatcactcactctacaaataaccaagaagttctcaaattaaaaaagacaatcagtagactccaccac

SEQ ID NO: 11772 - DNA, 201 bp, Homo sapiens
tacctgtaaaagacagagcaggaatttgaccctggcttcactaaacctagagccacactcttatttgctgtgctgggcttccatgaacagaagaaactctytcaagttggaaacagccagggtcgctatgatcccctgaacaaccaatttctcttcttgtgctctaggctgaattgtttgaatcaagcagaatgcaatatg

SEQ ID NO: 11773 - DNA, 201 bp, Homo sapiens
attttatggctgctcaatgttcctctgaaacatggttgcatcgtatgaatttattataatttaaccaaattttacttttgtcattaatattttatcattttaaatatcagtgattagcatcattgtacacgtttgtgtatatttctaaaataattttgttttttatgataaatttgtgaattttctggagaaaacagaatg

SEQ ID NO: 11774 - DNA, 201 bp, Homo sapiens
acagtggaaagagcacaagaccaaaagacaggagatggttgtgagaattacatgagataatgtatataaagcacatagtagaggtttaaatgaattatggytattattattatgttggagaccccatatattaaaagagattgttatttaaaaagaaatttatgaataccgacaaccagtcttaagctaaaatggcctcag

SEQ ID NO: 11775 - DNA, 201 bp, Homo sapiens
cctgagtccctcagttcctcaaagttattgtccaagcagcagctagaggactgaagacttaatctattacaaggagggtttatcatgaaaactaggactgytaaccctcttaatgtgactggagaaagaaatcttgggatagaaaagaaattactcatttggggcacagtttcctagccttggctaggaaaggctgatagc

SEQ ID NO: 11776 - DNA, 201 bp, Homo sapiens
aatacccactgctaagctttgtggaaggactgagaatgcaactgtcttacagctacaatgaagatgctgctgaaatgaaagcttcatgagggcagaatcayggcttccttgcacatagtaagcattcagtaaatacagacatgcagagtttaacatattttcagtagctgaaacacatctctccttagctgtcatatgaaa

SEQ ID NO: 11777 - DNA, 201 bp, Homo sapiens
tccccacctctactcactaagcacgtatttttttaatccacttttccctgcttctattattctcattctctccatttttctttctcattctgtatgttttmgtcctgctattggcacttagagctccaatacccactgctaagctttgtggaaggactgagaatgcaactgtcttacagctacaatgaagatgctgctgaa

SEQ ID NO: 11778 - DNA, 201 bp, Homo sapiens
aagtatattttctcatgtttccgttgttcacttgtatctttttcatacattttgaagtccttttccctaacctcctaaaaggcaagaatgtccccatttgyttattttctttccatgtggtaactggccataggtgtgtgttcaatccatgaggttggctaaacaattggtttctccaagaccagagaagatccttcagca

SEQ ID NO: 11779 - DNA, 201 bp, Homo sapiens
tggaatatccttcctcctgtcctgtattgggtacatcttgctctactttcaaactctgtttatgaatcacttcacgcatgaagctgtcccttgacgaagcyacttggctacttgtgtccaattatatttagataagtatattttctcatgtttccgttgttcacttgtatctttttcatacattttgaagtccttttccct

SEQ ID NO: 11780 - DNA, 201 bp, Homo sapiens
gaacagaaaaccaaatactgtatgttctcacttataagtgggagccaaacattgagtacacatgggcataaagaaggaaacgacagacaccagggcctgcrtgagtgtggagggagggagaatcaaaaactacctatttggtactgtgcttatcgcctgtgtgatgaaatgatttgaacatcaaacccctgtgacacacaa

SEQ ID NO: 11781 - DNA, 201 bp, Homo sapiens
ggtggagctggaggccattatcttaagtgagctaacacaggaacagaaaaccaaatactgtatgttctcacttataagtgggagccaaacattgagtacayatgggcataaagaaggaaacgacagacaccagggcctgcgtgagtgtggagggagggagaatcaaaaactacctatttggtactgtgcttatcgcctgtg

SEQ ID NO: 11782 - DNA, 201 bp, Homo sapiens
gagaaactgatctataagtggccttctaccaatcagtgttataagtgctatgggaccatggagacaagacccttaaaactcagtgctgaagagtttggaargctctctgaaagaggtgatgattaggttgatttttaagtaaaaagtggacattagccaggtgaaggaagtttatgtccaggggacagaatgtacaaaggt

SEQ ID NO: 11783 - DNA, 201 bp, Homo sapiens
gttctaactaccctctgcaagtatcatttgggtatcatcaccttcttaaatgtctacaacggttccccagattctttaattaaaagtaaaaatcatgatcmtgactttctagacccatcagctgtgaattcattcatcaaacatttattgcatacctaatgcatgtcagacatttgctaggtgtggaaaatatagagatga

SEQ ID NO: 11784 - DNA, 201 bp, Homo sapiens
gaaatcaaatgctttaattcgttagctcctcattcttaccatctctgagaaatttaagatgtcttctctcttttgttctaactaccctctgcaagtatcayttgggtatcatcaccttcttaaatgtctacaacggttccccagattctttaattaaaagtaaaaatcatgatcatgactttctagacccatcagctgtga

SEQ ID NO: 11785 - DNA, 201 bp, Homo sapiens
gagtttataggtgttgagccagtaaaaggacatggggtataacttgggcagaacaatgtaatgaagaactatgcatcatgggtatcaaaggttagaaaacratggtgggaatgcatgtgtctaaacacagccaatcaaccaaaaagtcttagtacgcacttactatgtgcctactgctgtgttatactctgatcattggat

SEQ ID NO: 11786 - DNA, 201 bp, Homo sapiens
ttgcttaagtcagtgcaatattacatttgtgtccaatattgtagaacttggagaggcagggctaaagaaaccctaattctgatagatcaacaatatcctayggaaaaggaaggagaaatgtaaaaacggttgagactaaacatccctgccttacatagttcaaagggcatgtttgtggtttaggaacagccaactccagaa

SEQ ID NO: 11787 - DNA, 201 bp, Homo sapiens
agcctcagacccttctcaatacagagccccaggcagcctcagccattcctaattgaatagaatttccagtgagattcaacatacaaacaatatttaaacarcaataaataaacattgatttttcaataaatcaaggggatttttactgctattgatgacaaattctgtagacaaattaaaagccactatttttttaagttg

SEQ ID NO: 11788 - DNA, 201 bp, Homo sapiens
agattgtcaagaaagaaatgcagtccaaagcttttcaaaaatgagaaaattgaaggtacctgagaaatgtccatggtattacagtgactaatagttcctcrgaggaacttagtatttgaatcacagttgcaccatgtatttctggaaagttatttaacctctctgcactcagctcatgaataaaagaggaataatgataat

SEQ ID NO: 11789 - DNA, 201 bp, Homo sapiens
cagaaaagaattcaacgccactcctccctggctttctaccttcagacctgtcttctcctggctaatattagtattaaataacgtggcacctgtgtctagakctactcagtgagaacaacaaggtcctcaccccaccctgcctgcttctcttcaatcctcctatttcctcttccttaccttctttctgttttttgtcaccta

SEQ ID NO: 11790 - DNA, 201 bp, Homo sapiens
gatgagtaactgaattgcagggagctgacaggatttactgtgaccacctgattagaggcagagctggaaccaaaatttagtgtgcccaacccaaaccagcrttctttccagtaccccatacagacacatctcaaaccacagttgagtcacatttgagaacatggctacagcccatggtgcataagctttcagtctggtggt

SEQ ID NO: 11791 - DNA, 201 bp, Homo sapiens
acaaggtaaagtcccatgacaggccgtctgcaagttgaggggcaaggaagccagtagtggatgagtctgagtcccaaaacttcaaaagtagagaagccgayagtgtagccttcagtatgtggctgaaggcttgagaggccctggcaaaaccactagtgtaaattcaagaggccaaaagccaaataacttggagtttaatgt

SEQ ID NO: 11792 - DNA, 201 bp, Homo sapiens
tggagaaaaagagattttaaaggaagaatcaaccgtgttaaaattattgggtagaggtggaagaaaataagcatcggctgtgtcattgatttaaagcctaytgtcaatcttgaaaaaaaagagggtgctaagaaactaaattgcatccattcatttcataaataactattgaatatctactaagtgccagccactgaagtg

SEQ ID NO: 11793 - DNA, 201 bp, Homo sapiens
gaggacataaaagatgaaaagaattcatagcagaagacagattggtaacaaagagaaaaccaataaagagcagtttcatctacatcaatggagaaaaagarattttaaaggaagaatcaaccgtgttaaaattattgggtagaggtggaagaaaataagcatcggctgtgtcattgatttaaagcctattgtcaatcttga

SEQ ID NO: 11794 - DNA, 201 bp, Homo sapiens
ttgaggacataaaagatgaaaagaattcatagcagaagacagattggtaacaaagagaaaaccaataaagagcagtttcatctacatcaatggagaaaaaragattttaaaggaagaatcaaccgtgttaaaattattgggtagaggtggaagaaaataagcatcggctgtgtcattgatttaaagcctattgtcaatctt

SEQ ID NO: 11795 - DNA, 201 bp, Homo sapiens
cccatattgaggacataaaagatgaaaagaattcatagcagaagacagattggtaacaaagagaaaaccaataaagagcagtttcatctacatcaatggagaaaaagagattttaaaggaagaatcaaccgtgttaaaattattgggtagaggtggaagaaaataagcatcggctgtgtcattgatttaaagcctattgtc

SEQ ID NO: 11796 - DNA, 201 bp, Homo sapiens
aaaaaggtcccaacagaaatattcagtgagaaagggcttgaacttaagttactattatgggttgaacaagaaatttgggagtcatctaaacatagaaggtwgttgtaatcacaacaaagagtgtgcccatattgaggacataaaagatgaaaagaattcatagcagaagacagattggtaacaaagagaaaaccaataaag

SEQ ID NO: 11797 - DNA, 201 bp, Homo sapiens
ttttttgagaaggagtctcactctgtcgcccaagctggagtacagtggtgtgatcttggctcactgcaacctctgcctcccaggttcacgccattctcctkcctcagcctcccgagtagctgggaatacaggggcccaccaccatgccccgctaattttttttttgtatttttattagagatgggtttcaccatgttagcc

SEQ ID NO: 11798 - DNA, 201 bp, Homo sapiens
atagaggaacatatggaactggataggaacagagaggggccatccaaatcagactcagagtaaggaaaggacatggaggcttctgggttgatggtggtaamatttcataaaatctctgggtttcagccaagtgaagaaggggaggggcctcctcagcagagggactagaaagtgccaaggcaggagtgaagcaacatgatg

SEQ ID NO: 11799 - DNA, 201 bp, Homo sapiens
tgagatttttaaaagcacaacttgagacacatatactctcaatagcagagtcaggaactatttctgtgaggcagtcatattcacactgctgtctagtggaygagaaggttctcaaagtggggaagagcaggaggtctacaaaggccttgagggggatcaattcagtatgtttgtacagtagagagatggctgctgtgatat

SEQ ID NO: 11800 - DNA, 201 bp, Homo sapiens
tgtaaatgcttagaattattcaaatgacggaaatctctcccctgtcaacataactgaaggtttatgctaatgagatgactcaaggtgggggctggcagtgmcagaaagaccaacccagtggttaaaggtttggaatttgagccacatgaaacagcctctaaggagggagaggctctaaggagggagagggtggagattgag

SEQ ID NO: 11801 - DNA, 201 bp, Homo sapiens
caggaaaccaaacactgcatgttctcactcataagtgggagctgaacaatgagaacacatggacacagggaggggaacatcacacactggggcctgttgcrgggtgaggagctaggggaaggatagcattaggagaaatacctaatgtagatgacaggttgatgagtgcggcaaaccaccatagcatgtatatacctatgc

SEQ ID NO: 11802 - DNA, 201 bp, Homo sapiens
attgttaccagccaatcattatgattttatatgatttggttgtcttctttttaacacattattttcagtttctaggacagccataattttgcatgagtttrtaccagatttcttgctctgcctttatgtattttttaaactttctattctttttaatattcttctatcctcttattttgtttttgaaagtttcttcatctc

SEQ ID NO: 11803 - DNA, 201 bp, Homo sapiens
cttgttatctctatcatcccaaacacagatctcatactaagtgctcaattagtaagtatggattggttgattgactgaaacaattttcagcttcccattamtactttccatttggactagttatttgtattttcaccttctaatggcagaggtaaaatatcctaaataaagccaaagacttttctggaaaaagaagagagt

SEQ ID NO: 11804 - DNA, 201 bp, Homo sapiens
aataatgtgattatttcttaaaccctcaattataaataaaagattctcatacttgttatctctatcatcccaaacacagatctcatactaagtgctcaatyagtaagtatggattggttgattgactgaaacaattttcagcttcccattaatactttccatttggactagttatttgtattttcaccttctaatggcaga

SEQ ID NO: 11805 - DNA, 201 bp, Homo sapiens
aaacatgcttgggagaaatctcctgcataggaaccatagacggagatgtttctgcagtatttaaatgacagttgtttacccccacctctcaccactcatcrtgccttctcctggttgttttagtcagctgtataatcaatcctgatgagtcatatcttcactactgagggaaagggaatgggagaaaagctgagggaaaca

SEQ ID NO: 11806 - DNA, 201 bp, Homo sapiens
tggttcataatgattttgtgagaaattacattactctgtgaaaagagaagtgaactcaggtctaatttttccagtgacttttttctggcccaaacaattcwttaaattgtgttggcaccatagaaacatttgtttattacctatattgcttagtgtggcagaatggaaggggaaacatgtttggctttgaaatttgaagtt

SEQ ID NO: 11807 - DNA, 201 bp, Homo sapiens
atgcaatgggtatcaaagttttaatggccaagcattattaatacaacaaataggtcttctaagcatttcacgtaatatttttaagcttattagacttttttatgtcataataaggatactgattcaaatgtagagattatttttcctttggtaaagatgaagcctgtggtttttataaattccccttttttctctctgcca

SEQ ID NO: 11808 - DNA, 201 bp, Homo sapiens
caagccttaactcttcaaaaatggcaggttaatcaaaggcaaaacataggtgggaaactgcttggaacttaagaaagacagtacaactaatgcaaggtgtrggatccttgattagagtctggatttttaaaatcagctaaaagatacattacaaaacaaacaaacaaccaaacaaacaaatcattttgggacaactgagat

SEQ ID NO: 11809 - DNA, 201 bp, Homo sapiens
ttggatctgaaatggagtcatcagcaccaattcatgatttcaaaaatgtatatattctctgcctcctgaagggacccagaaacaatgtcaccttgagtcaytgaacatattaatatcaagatcttggttttgaaatactactcactactcactactgaaagcaaacaatgtttcctggagaaatggctaattccagattac

SEQ ID NO: 11810 - DNA, 201 bp, Homo sapiens
ccaaaagcaagaaagacacaaaggaggattctatcctacagattagagaggagagtatggacctgctgacaccttgattttgaatttttagactccagaaytgtgagataataaatttccattgttttaagccacccactttgtggtactttgttatgcaggcctaggaaacgaatacagaaaaaaaaggcataccatatc

SEQ ID NO: 11811 - DNA, 201 bp, Homo sapiens
ttctttcttcctcctgctcccaccataaaagacacctgctccagctttgccttctgccataagtaagagctccctgaggcctccccagaagcagatgctgycatgcatcctgtacagcctgtggaatcatgggccaattaaacctcttttctttataaattacccaatctctggtatttctttatagcaatacaagagtgg

SEQ ID NO: 11812 - DNA, 201 bp, Homo sapiens
tcccgggttcatgccattctcctgcctcagcctcccgagtagctgggactacaggcgcccgccaccacgccgggctaattttttgtatttttagtagagayggggtttcatcgtgttagccaggatggtctcgatctcctgacctcgtgatccacccgcctcggcctcccaaagtgctgggattacaggcgtgagccactg

SEQ ID NO: 11813 - DNA, 201 bp, Homo sapiens
catgaaatgatttcagaatctgccttacttgtccaagggtcgtgaaccagcaaggagggagacttcgtatcaccacagatggtaagggattggggagcagsctggcatggaacaagtgtccactgagcggccaggaaagcctgtgaccatggtgaggggaggaggcagtgcagctgacagccacagttgatcagctagtcc

SEQ ID NO: 11814 - DNA, 201 bp, Homo sapiens
gtagggggaccatttattaaggtgaaagtaaggtgaggaagctacaagtactttgaggctagtgacagttggatttggaggagggattggtagcaccctakgccagaaggggcaagggaaggaagtagttaccagaacctagagacagataacaaacatagaaagaggcatgggtgacagctgttggaaagagcctggctt

SEQ ID NO: 11815 - DNA, 201 bp, Homo sapiens
aatatcagacttttgggttgggatctctgctctgtcacgctctagctgtgggacagagggcaaattatttgactgttttatctctatattctcatgtgtasagtgagaataatatacagttgttaagattcaataagttaatacatataaaatgcccagaacatagtaaatgttcagtaagttttacttattacatccatt

SEQ ID NO: 11816 - DNA, 201 bp, Homo sapiens
ttcgtttatctttctaactgaattaagttcttgaaagtgcacagaaaagatggattcatttaacactcatgacttggatttattttgcctcagtgcatttrtctacaagatgagacagacaaatatctgtttaaaggcacctcctagtattgagctgaaagtaacataaataagaaatgcattttaaaagctaaaaattca

SEQ ID NO: 11817 - DNA, 201 bp, Homo sapiens
ggcaatagctcctccacccaatagaaccccagaagcattttcctctgctgatcccctaccatcttctcaactcattcttcttaagaggccccagtgaaagwcagttccactagatgtgtgctgactcagtcaggccagccaacctcgattgagaactcacctgaatgcaggagccatgagccagtcagctcatctctgaag

SEQ ID NO: 11818 - DNA, 201 bp, Homo sapiens
gattggaaaggaaacaaaaatttaaaacaaagaaaccaaaaaaaaaaaaaagtgtgtttgattaatcacagcttggcaatagctcctccacccaatagaascccagaagcattttcctctgctgatcccctaccatcttctcaactcattcttcttaagaggccccagtgaaagtcagttccactagatgtgtgctgactc

SEQ ID NO: 11819 - DNA, 201 bp, Homo sapiens
cctccatcagtgcagcttggttgatgtaccaaccaggatcctggcaagaaacagatggcacactcaaattgggtgctttgaagagagatagtagggggacyatttattaaggtgaaagtaaggtgaggaagctacaagtactttgaggctagtgacagttggatttggaggagggattggtagcaccctaggccagaaggg

SEQ ID NO: 11820 - DNA, 201 bp, Homo sapiens
agcccagaatggacttgtccttgagctccacaactggaatcccagaataagggaggcagttgatgcaggtcagactcatggagaaacagcagggtgaattstggatctgaaagtgaaaataaaagaaatacaaaaaccaatgagattgattcccaaactccaaggtcatggctgctgctaattcataggtacctctttgtg

SEQ ID NO: 11821 - DNA, 201 bp, Homo sapiens
atttagtctttcagggaggcagaagatgaccaaggtgactatgggggcagtgagggccctgtggcttcattcctaaagttcagcacagtgctcctccatcwgtgcagcttggttgatgtaccaaccaggatcctggcaagaaacagatggcacactcaaattgggtgctttgaagagagatagtagggggaccatttatta

SEQ ID NO: 11822 - DNA, 201 bp, Homo sapiens
cagtgagggccctgtggcttcattcctaaagttcagcacagtgctcctccatcagtgcagcttggttgatgtaccaaccaggatcctggcaagaaacagayggcacactcaaattgggtgctttgaagagagatagtagggggaccatttattaaggtgaaagtaaggtgaggaagctacaagtactttgaggctagtgac

SEQ ID NO: 11823 - DNA, 201 bp, Homo sapiens
aggcttgaagaaatctctcaaattaaaggatgctcatttctgtttgtattcttgtacatcagatttttgtaatacagaattctcctgacatcactaactcrtaagtaaaaataagatcagatttgctttgatattcaagttacatagatttctagatcccatatgatcagagtagcaacaaatgcagttatccaccaatcc

SEQ ID NO: 11824 - DNA, 201 bp, Homo sapiens
ataggtaaactagtgtcacaggggtttgttgtacaaattatttcatcaaccaggtattaagcccagaaccacatagttatcttttctgctcctctccttcytcccaccctccaccctaaagtaaaccccagtgtttgctattcccttctttgtgttcataagttctcatcatttacataccacatttttatccattaatct

SEQ ID NO: 11825 - DNA, 201 bp, Homo sapiens
aagcaaaaaacagtgacaggcacggtagatacattcttaccagtcttcaagcagtgcctctaccttcataaagtaggataatctataatgatttaaatggyaataagaaactaggtaaatattttagagtccccagtcatacatcttatactccagccatatcaaatgtcttactttctttaaaccagcctagcctattta

SEQ ID NO: 11826 - DNA, 201 bp, Homo sapiens
ctggagtgcaatggcaccaatctcagctcactgcaaactcctcctcccgggttcatgccattctcctgcctcagcctcccgagtagctgggactacaggcrcccgccaccacgccgggctaattttttgtatttttagtagagacggggtttcatcgtgttagccaggatggtctcgatctcctgacctcgtgatccaccc

SEQ ID NO: 11827 - DNA, 201 bp, Homo sapiens
ccgccaccacacttggctaatttttgtatttttagtagagatggggtttcaccgtgttggccaggttcatctcgaactcctgaccttaggtggtcctcccrcctcagcctcccaaagtgctgggattacaggcgtgagccactgcgcccgggcgagagtacttaatacttacaaatacaaaagaaagttgttcaaatctaa

SEQ ID NO: 11828 - DNA, 201 bp, Homo sapiens
agacttaaatgtaagacctaataccataaaaaccctagaagaaaacctaggcaataccattcaggacataggcatgggcaaagacttcatgactaaaacamcaaaagcaatggcaacaaaagccaaaattgacaaatgggatacaattaaactaaagagcttctgcacagcaaaataaactatcatcagagtgaacaggca

SEQ ID NO: 11829 - DNA, 201 bp, Homo sapiens
tttgtgagaaatgcagtctaagtcctattgaatcagaagacgcatgttaacaaaatccccacacagttcatattcccagtacaatatgaggattgggcaaygggcttggtgtggaaggggaactgagtatggaaataagaagcctaaaaattccacacagtaccgctggcagaacaatttggaggacatggttcacagtca

SEQ ID NO: 11830 - DNA, 201 bp, Homo sapiens
acctcagcctcccaaagtgctgagccaccgcgcctggcctatttcttaccattgcatgtgtatttacaattttctcaaaagaaaaagttgaattaagagayaatactcagaagccatccaaaacaaaataaatacaggttattaacaatatatacatgttaagttgtatctatatgttatttgacatcctctaccagatgt

SEQ ID NO: 11831 - DNA, 201 bp, Homo sapiens
gctctagtgctgcaaaatattaacatcgtgggacactgggaaatgaatacatgggatgtttctgaactctttattacttcttcttcctttttttttttttttgtttgtttgtttgattttttcagtagagatggtggaggtggagggttccagggtgatcttgaactcctggcttcaagggatcctcccacctcagcctcc

SEQ ID NO: 11832 - DNA, 201 bp, Homo sapiens
gctgaaaagttctcaattcgacaagaggcataaacctacaaattcacaaagcttagcaagccataaacagaataaagccaaaaaatttactctaatacackcaataattaaacttttgaaaaccaaagataaagaaaaaatcttgaaacagtctgagaaaaacaacactttatctatggagaaaataattaaaatgacaat

SEQ ID NO: 11833 - DNA, 201 bp, Homo sapiens
tcaatagaggatgaaaggaaagcctgaacttctactctacctgacgataatgaagcatgatctctctgttggagcagtgtctgataaaaaaaaaaaaaaaagaaaaaacagctaaaacagaagatttatgctgtaagactgagagtcttataatggaattctgaaaatgtccagacttcaataaaaaaatcactcactcta

SEQ ID NO: 11834 - DNA, 201 bp, Homo sapiens
ctctgtctccctccctctcctcagtaggtaagtagatagatagatggatagatagatagatagatagatagatagatagatagatagatagacagacagayagatagatagatagatattgttcagttagagtttgtggcctcaaacctttatatcaccctttggtcactatcaaaatggaagttccttggaaaaataata

SEQ ID NO: 11835 - DNA, 201 bp, Homo sapiens
ctgtctatctctctctgtctccctccctctcctcagtaggtaagtagatagatagatggatagatagatagatagatagatagatagatagatagatagayagacagacagacagatagatagatagatattgttcagttagagtttgtggcctcaaacctttatatcaccctttggtcactatcaaaatggaagttcctt

SEQ ID NO: 11836 - DNA, 201 bp, Homo sapiens
catcacatggctccaggtggggaggaataaggaaatactaaaaagattgggcagagtaaagcaatcttacctgttttctttttttttcttcccccccccccttccccccactgtcagggtcaggacagcataagacatagtgggatgggacaaggatgataagcatctgatccaaaagcataaaaagatgaccaatgcttt

SEQ ID NO: 11837 - DNA, 201 bp, Homo sapiens
acagaatttaccactcagtcgttgataattcaaataagaaaacaagaaactaaagatacagatctgaataagctcattaataagtgtaaatagataaatayagcaaactctgtagcaaaaaaagtacatctttttttttaagcactcatgtacaacttacaaaaatattatcctacacacaaagaaaacaaaacatctaaa

SEQ ID NO: 11838 - DNA, 201 bp, Homo sapiens
ttcacaccaaatattttatggctgctcaatgttcctctgaaacatggttgcatcgtatgaatttattataatttaaccaaattttacttttgtcattaatattttatcattttaaatatcagtgattagcatcattgtacacgtttgtgtatatttctaaaataattttgttttttatgataaatttgtgaattttctgga

SEQ ID NO: 11839 - DNA, 201 bp, Homo sapiens
attcacaccaaatattttatggctgctcaatgttcctctgaaacatggttgcatcgtatgaatttattataatttaaccaaattttacttttgtcattaatattttatcattttaaatatcagtgattagcatcattgtacacgtttgtgtatatttctaaaataattttgttttttatgataaatttgtgaattttctgg

SEQ ID NO: 11840 - DNA, 201 bp, Homo sapiens
cattcacaccaaatattttatggctgctcaatgttcctctgaaacatggttgcatcgtatgaatttattataatttaaccaaattttacttttgtcattaatattttatcattttaaatatcagtgattagcatcattgtacacgtttgtgtatatttctaaaataattttgttttttatgataaatttgtgaattttctg

SEQ ID NO: 11841 - DNA, 201 bp, Homo sapiens
tcattcacaccaaatattttatggctgctcaatgttcctctgaaacatggttgcatcgtatgaatttattataatttaaccaaattttacttttgtcattaatattttatcattttaaatatcagtgattagcatcattgtacacgtttgtgtatatttctaaaataattttgttttttatgataaatttgtgaattttct

SEQ ID NO: 11842 - DNA, 201 bp, Homo sapiens
ttgtccataattcttgattacttgcatttctctgtgcctcagatcttccaactgtaaaatggaaatgataaaagcaccttcacacatttctttttttttttcacaattacaaactctttattgaggacatctgtgaatcatgagtgtgaagttatttatgatagttttctgtgataaaaatataaccgcacttttccttct

SEQ ID NO: 11843 - DNA, 201 bp, Homo sapiens
aagaagaagtatatttatttttctttgcaatcatctctatgtatttttgaggtacaggaacacacatttgagagccctgacacagaagggcagaaaaaaaaggaaaaaaagaaaagaaaaaagaaagacaagacaagacatcaaaaggaaagcaaaactataccatgttgtccttggaggtgtaagatgagagaatctgaa

SEQ ID NO: 11844 - DNA, 201 bp, Homo sapiens
tctaccagcttactttcatggcactgattctgggtgagatcactgggagacaccaagacaccaagcaattcagcctttagatgaacaacataaaaaaaaaatgcaagtagccactccagaatcactttataagggactttaaagaatactatgaaacaaaaataaatccattgctccatctttttgttacgtatttcagaa

SEQ ID NO: 11845 - DNA, 201 bp, Homo sapiens
gcaggctgggggagagagggcagggtggcaggagtggagaccatggacatttgagccacttcctcatgtaacttacttgtgtcttcaggagctactcaaayccaatcaagtataaataacttccatttcatgatggaaggctgctgaagtgtgcatgccccactttatggctagatgggtcagaaagcacccagttcatga

SEQ ID NO: 11846 - DNA, 201 bp, Homo sapiens
attattattatactttaagttttagggtacatgtgcacaatgtgcaggtttgttacatatgtatacatgtgccatgttggtgtgctgcacccatcaactcrtcatttagcattaggtataactcccagtgctatccctcccccctccccccaccccacaacagtctctgatgtgtgatgttccccttcctgtgtccatgtg

SEQ ID NO: 11847 - DNA, 201 bp, Homo sapiens
ggtcaatcaccccaaccaacactctaactcccttcttagcctgttaatttagaagtaggaggaacccaacatggccaggtggcaatcttttttttttttttcctaaataatttttatttatttatttattattattattattatactttaagttttagggtacatgtgcacaatgtgcaggtttgttacatatgtatacat

SEQ ID NO: 11848 - DNA, 201 bp, Homo sapiens
tcactggtcattagagaaatgcaagtcaaaaccacaatgagataccatctcacaccagttaaaatggcaaacattaaaaagacaggaaacaacagatgctrgagaggatgtggagaaataggaatgcttttacactgttggtgggagtgtaaattagttcaacattgtgaaagacagtgtggcgattcctcaaggatctag

SEQ ID NO: 11849 - DNA, 201 bp, Homo sapiens
agtatgggaagttctggccagggcaatcaggcaagagaaagaaataagtggtattcaaatggaaagagaggaagttgaattgtctctttgcagatgacatrattatatatttcaaaaaccccatcgtctcagcccaaaatctccttaagctgatgagcaacttcagcaaagtctcaggatacaaaatcaatgtgcaaaaat

SEQ ID NO: 11850 - DNA, 201 bp, Homo sapiens
acccaatacaggagcacccagattcataaagcaagtccttagagacctacaaagagaattagacttccacacaacaattgtgggagactttaacacttcaytgtcaatattagacagatcaatgagacaggaaattaacaaggatattcaagacttgaactcagatctggagcaagtggacctaatagacatctatagaac

SEQ ID NO: 11851 - DNA, 201 bp, Homo sapiens
tattgataattaagcattttgaataaaatgagcagataaccaaacctgttaagcataagctgttttgttattattgtttttatattcaagagtaattaaaatcgaagacattagttatatcatgagtttcttttggtccaatggattactttcttaaaaattgtcaagctaattactaggtaattcagcattgacaaaata

SEQ ID NO: 11852 - DNA, 201 bp, Homo sapiens
attcatatgcaatgggtatcaaagttttaatggccaagcattattaatacaacaaataggtcttctaagcatttcacgtaatatttttaagcttattagamttttttatgtcataataaggatactgattcaaatgtagagattatttttcctttggtaaagatgaagcctgtggtttttataaattccccttttttctct

SEQ ID NO: 11853 - DNA, 201 bp, Homo sapiens
atcgcttgaacccgggaggcggaggttgcagtgaaccgagattgcaccactgcactccagcctggtgacagagcgagactccgttaaaaaaaaaaaaaaaatgaacaggaaggaacgtgcaccttccagaaaaacaagaagagatgaagagtgagagagagaaatgagaaatgaaaggagaattggtatggtttggatctg

SEQ ID NO: 11854 - DNA, 201 bp, Homo sapiens
gaattaagttcttgaaagtgcacagaaaagatggattcatttaacactcatgacttggatttattttgcctcagtgcatttatctacaagatgagacagacaaatatctgtttaaaggcacctcctagtattgagctgaaagtaacataaataagaaatgcattttaaaagctaaaaattcaagtgtaatttttatagtgg

SEQ ID NO: 11855 - DNA, 201 bp, Homo sapiens
ctctaacatgcacaattttaaaaatgcatttatctccaagtttagagtaagagtaagacagagaactgtgcttttctcaagtgtttgccaactttcaaacytttggcattttaagcagagatccttacaaaatggagttttccctgacatgtctggatgtgtatgtatctgaactgactgaatttagtctttcagggaggc

SEQ ID NO: 11856 - DNA, 201 bp, Homo sapiens
ttaagactccctcatggaggtatatccaatcctgattaacagggctgtggataaaatggtctgagataaaggcaaagtgttcgatgagctcttcctgagaytcctgagctatttcatttccttctttcttattttggcctcataaaatattgtttgtggtgtctcaccagaaatgatcttgtacacgttagcactctaaca

SEQ ID NO: 11857 - DNA, 201 bp, Homo sapiens
ggcatctctttccctccgtttaagactccctcatggaggtatatccaatcctgattaacagggctgtggataaaatggtctgagataaaggcaaagtgttygatgagctcttcctgagattcctgagctatttcatttccttctttcttattttggcctcataaaatattgtttgtggtgtctcaccagaaatgatcttgt

SEQ ID NO: 11858 - DNA, 201 bp, Homo sapiens
atttcttaccattgcatgtgtatttacaattttctcaaaagaaaaagttgaattaagagataatactcagaagccatccaaaacaaaataaatacaggttmttaacaatatatacatgttaagttgtatctatatgttatttgacatcctctaccagatgtttggaaactgagaaatttgatcatggagattaaataattt

SEQ ID NO: 11859 - DNA, 201 bp, Homo sapiens
tggaaggctgctgaagtgtgcatgccccactttatggctagatgggtcagaaagcacccagttcatgataggcggttcaggtcacatggtgacttgatgastcatagtcaaatgttcagtttctaccaaaacccagtaacaggccaagagctgtctctcaaaagcagagtagttatctgtagaagatggcagagccttgct

SEQ ID NO: 11860 - DNA, 201 bp, Homo sapiens
catacatgagatagataatattataatgtctaattaacagatgaagaaatttaggtttagaaagttactgaagcaatattacctgtaaaagacagagcagraatttgaccctggcttcactaaacctagagccacactcttatttgctgtgctgggcttccatgaacagaagaaactctttcaagttggaaacagccaggg

SEQ ID NO: 11861 - DNA, 201 bp, Homo sapiens
catccacacagtccctagaattgttcccaacacacttgggaactcggtcaatattaattaggaagaaggcagaaacatacttagaagcatgaagtatcatkgaaaaagactgaatgtaggcagcaagagatggaaaaaaacttgacaaggtatacttactttgaaagttggggtcaaatccttaagctttcaactcatttg

SEQ ID NO: 11862 - DNA, 201 bp, Homo sapiens
caggccaagagctgtctctcaaaagcagagtagttatctgtagaagatggcagagccttgctccaaaatccaagaggcctttgcagtgacctatgggggcrtgccaaaggctccaaacaatatccctatctgccactgacatctcaagtcccattggatctgctgggtaatatggtccaagtggcagagcagcttgcatag

SEQ ID NO: 11863 - DNA, 201 bp, Homo sapiens
taacaggccaagagctgtctctcaaaagcagagtagttatctgtagaagatggcagagccttgctccaaaatccaagaggcctttgcagtgacctatgggrgcgtgccaaaggctccaaacaatatccctatctgccactgacatctcaagtcccattggatctgctgggtaatatggtccaagtggcagagcagcttgca

SEQ ID NO: 11864 - DNA, 201 bp, Homo sapiens
ccagggagggggcagaatcacatcaagtgtgaaacgtaggcagaggccaggtaacacacaaccttgtggttgaaattttattatgttagatatcggaagaytttaaaaggttttaagcagggaagtagcatgagtctacttacgtttccatcaaaatatatttattaagtgcctacggtgtgccaggcatgggtttagaca

SEQ ID NO: 11865 - DNA, 201 bp, Homo sapiens
acggagtcatctgatttatcaaatacattcacattttttatttcctttaaagtggcagctttacttaataaaaaataaaaactgatcatcaattgaataarcctaattcaactctccttgcccttttcttcatgacttactatggtcatcttattttcatctgcagatgattcaaacttattgtaattccttcatatcctt

SEQ ID NO: 11866 - DNA, 201 bp, Homo sapiens
actgtcattttcttcattcagatttctggccttatgtgctgtggccagaacccatccagatgacatgctgtggccctcaactgaggccttgcccatcctgrcagaatatcccacgtggcctcttatgcccacctctaagctctgaaacatgcttgggagaaatctcctgcataggaaccatagacggagatgtttctgcag

SEQ ID NO: 11867 - DNA, 201 bp, Homo sapiens
caatttccaaattgctctatcaagggcttacaacaacagaaataggatttacgaatgtttctttgcccatcccagagccaacaccctactatcaaacttgrtttatctttgtacatctgactagtgaaaagtagcatattattcttagttttttaaaaatatgagtcatttagattcattttctagactttctaaggtttt

SEQ ID NO: 11868 - DNA, 201 bp, Homo sapiens
actgccattggcatgccatgccactggtcttaggaactgcctctctatctgaactgttagaattgccacctataatgctggtgattgttcacaaacactaygcacatatctgtagcagcttcagcattgtgcaggtgcagtaacacacacagactgcccgaaaatatttgttaagctctacaaaagagcaaccactgacaa

SEQ ID NO: 11869 - DNA, 201 bp, Homo sapiens
tcttctagatctgtcaccacattagttgggtgactttgggtaatttagcagctgagtgcctcagtttcctcaactgtaatatgtagataataacactatcygcctaatagggctgttgtgggatttttaaaaagtcaattcacaaaaaaaatgcttaaaatggtagatatctagatatttgccttataaaatgtgcctgtt

SEQ ID NO: 11870 - DNA, 201 bp, Homo sapiens
ggcagaagaatttaggagtgatatatgactttttgtcttccttcctcctgtcatggcaaagcaacattccagaggcagtttaatttttttaaagctaattsctgcattttatttggccatttgtcttgaaaccaacatccggaattaattcaaaagaatggtatcttctagatctgtcaccacattagttgggtgactttg

SEQ ID NO: 11871 - DNA, 201 bp, Homo sapiens
ttagcacatggccttttatatgatagatgcttgtctcttctcaagacccagccaactaactaacagttagtaggattgactcagaaacagggcacaacatraaaataaagctcctagaacttgaactatgacagaaaattggtgatcattgggctacaggatcagtgcttccaatgatagatgccacatcccaaagtgtgg

SEQ ID NO: 11872 - DNA, 201 bp, Homo sapiens
gatggtcactctcctgattgggaagggaatgctacatgataaggcctcaatagacttttgtatagtttcttgcttcaaagaactttgttcaggcccctcarcaagaaggataaagtcctcattgtcttgcttggtttccaatctggtttcctccctttctcttccacgccctgaactttaacttaaccagcatctccacta

SEQ ID NO: 11873 - DNA, 201 bp, Homo sapiens
ggtataacttaacattagagacatttctgtaagaagaaatcaaaaaatgcaaactaaagtttagcaactcaggaatttggttaggtttaactatcaggagycagactccaaaagtagactaaagtgtggccgtcctaatctctgtagtgatcagagcttgtctgaactcttttttgtatatttggtttatttctagctggt

SEQ ID NO: 11874 - DNA, 201 bp, Homo sapiens
cctctgagtggatatctgcccaagacatccttttcatacccacaattgaattttcttttggtaatttgaatattttacatttaacttccttgctcacaaaygtgaaggtataacttaacattagagacatttctgtaagaagaaatcaaaaaatgcaaactaaagtttagcaactcaggaatttggttaggtttaactatc

SEQ ID NO: 11875 - DNA, 201 bp, Homo sapiens
attacgtttattgatttgcatatgttgaaccagccttgcatcccaggaatgaagccgacttgattgtggtggataagctttttgatgtgctgctggattcrgcttgccagtatttcactgaggatttttgcatcgatgttcatcagggatattggcctgaaattttttgttgtgtcactgccaggttttgctattaggatg

SEQ ID NO: 11876 - DNA, 201 bp, Homo sapiens
tgatgcaggtcagactcatggagaaacagcagggtgaattctggatctgaaagtgaaaataaaagaaatacaaaaaccaatgagattgattcccaaactcyaaggtcatggctgctgctaattcataggtacctctttgtgaactagaaaaataaaatgcctttttgagtgacgcagacctattagtgcacagggttttgt

SEQ ID NO: 11877 - DNA, 201 bp, Homo sapiens
gacagagaactgtgcttttctcaagtgtttgccaactttcaaacctttggcattttaagcagagatccttacaaaatggagttttccctgacatgtctggrtgtgtatgtatctgaactgactgaatttagtctttcagggaggcagaagatgaccaaggtgactatgggggcagtgagggccctgtggcttcattcctaa

SEQ ID NO: 11878 - DNA, 201 bp, Homo sapiens
aagtttagagtaagagtaagacagagaactgtgcttttctcaagtgtttgccaactttcaaacctttggcattttaagcagagatccttacaaaatggagktttccctgacatgtctggatgtgtatgtatctgaactgactgaatttagtctttcagggaggcagaagatgaccaaggtgactatgggggcagtgagggc

SEQ ID NO: 11879 - DNA, 201 bp, Homo sapiens
aaggccctggaaagtctgaaccattgcttatctttaatttatggttctctgctaagggcagcacagaactgattgttcataaggttaaaattttggcttaygaaagttgtgcatcacagaacaggcattaagacaaacttctattgcattcttttttttagttgtggcatctctttccctccgtttaagactccctcatgg

SEQ ID NO: 11880 - DNA, 201 bp, Homo sapiens
tttcagagttactcctgagtcaaggccctggaaagtctgaaccattgcttatctttaatttatggttctctgctaagggcagcacagaactgattgttcayaaggttaaaattttggcttacgaaagttgtgcatcacagaacaggcattaagacaaacttctattgcattcttttttttagttgtggcatctctttccct

SEQ ID NO: 11881 - DNA, 201 bp, Homo sapiens
cgtattcagctatattaagtaaaacaaagaccaaaagaactggaataatcttaattagatgtttattctagtcaatatctatatctagtgtgtatcatttyggacagttgtctttctttcaaaacccttcagctagaatgcctaccccactgtcacctccactgcagccttcaagaccaaagtcttacattattatgtgga

SEQ ID NO: 11882 - DNA, 201 bp, Homo sapiens
ggaatcatgggccaattaaacctcttttctttataaattacccaatctctggtatttctttatagcaatacaagagtggactaatgcaaaaaaaactatayaaaaaacgtgctgttaataaagatttaaatccagtcagagcagacaaatgagaagtaattgaaaaaaataaaaaggtataagatgatatataaattgggt

SEQ ID NO: 11883 - DNA, 201 bp, Homo sapiens
aacagtcaagatcaaaatacataaatcaaaaacttagaaattcaaggagaactcagcagaaacataatgttattggaataacagaatttaccactcagtckttgataattcaaataagaaaacaagaaactaaagatacagatctgaataagctcattaataagtgtaaatagataaatatagcaaactctgtagcaaaaa

SEQ ID NO: 11884 - DNA, 201 bp, Homo sapiens
agatgaggaaaaaccagcgcaaaaagcctgaaaattccgaagaccagaatgcctcttttcctccaaaggatcacaactccttgccagcaaggaaacaaaaytgggtggagaatgagtttgacaaattgacagaagtattcttcagaagggggtaataacaaactcctccaagctaagggaacatgttctaacccaatgcaa

SEQ ID NO: 11885 - DNA, 201 bp, Homo sapiens
tctgtgctctcattctgcatgttcaattaaataacatattctgtgcattgtatctcctagatatttattaatcttctctgctttacttctatatctctcakgtagttttagtctcataagtttaattacattctaattgagtttcttatttgtagtcttgacttctccaaactcattcactgcaccaaagccacctggggt

SEQ ID NO: 11886 - DNA, 201 bp, Homo sapiens
agatatggccaggcaggctactgatcttgtaagcaggggtgggctcccttccaggaccatgaaggggacctttaactgaccatagagggcaggtagctctstaagtacgttaagagctcagtgtctgactgaaagtagtgtaatagtattcatagctgtgacagggaacattttaggagtaaagaaagtcaactcttttta

SEQ ID NO: 11887 - DNA, 201 bp, Homo sapiens
acacacaaccttgtggttgaaattttattatgttagatatcggaagactttaaaaggttttaagcagggaagtagcatgagtctacttacgtttccatcaraatatatttattaagtgcctacggtgtgccaggcatgggtttagacactggggacatagcagtgaacaaaatagacacaaatatcaggtggcatagaaat

SEQ ID NO: 11888 - DNA, 201 bp, Homo sapiens
aggcaataagagaggacacaaacaaatggaaaaacattccatgctcatggataggaaaaatcaatattgtgaaaatggccatattgctcaaggtaatttayagattcaatgctatccccatcaagctaccattgactttcctcacagaattagaagaaaactgccttaaatttcatatggaatttgaaaaaaacctggata

SEQ ID NO: 11889 - DNA, 201 bp, Homo sapiens
tgcaggtcagactcatggagaaacagcagggtgaattctggatctgaaagtgaaaataaaagaaatacaaaaaccaatgagattgattcccaaactccaargtcatggctgctgctaattcataggtacctctttgtgaactagaaaaataaaatgcctttttgagtgacgcagacctattagtgcacagggttttgttct

SEQ ID NO: 11890 - DNA, 201 bp, Homo sapiens
agttagaatagaatgtatagatgggggggtcccctatgaaagcccacagaaaggctggaaagttgttaacgttgtgtgctgctattgcttttttctgaagkaagtgacgcccaaggccgacttggaggataaattggagtgagttgagtgaggtgttgatggaagagagaacaaaggtaatccaggaacaggaaaatatgt

SEQ ID NO: 11891 - DNA, 201 bp, Homo sapiens
cccatgatgtatagtggtaggtcacaacttcaaggacaatgaggtggatggacaggtaactatgtgtgaatgtgtgatatgatggttacaagaccacagasagtggctggagagagcactggccctgtctaaaggcatgctgcttcattgaaaacaaaacaaaaaccaaaaacccttcaccacacaaaacatgtccatggg

SEQ ID NO: 11892 - DNA, 201 bp, Homo sapiens
ttatatttcttgactctatcaatgtcaatagcttggttgtaaaatgtgctctagtgctgcaaaatattaacatcgtgggacactgggaaatgaatacatgsgatgtttctgaactctttattacttcttcttcctttttttttttttttgtttgtttgtttgattttttcagtagagatggtggaggtggagggttccagg

SEQ ID NO: 11893 - DNA, 201 bp, Homo sapiens
ggatgaatcatcctattcacttgattattaaagtccttctctgttaaggtcatcctctggttagcattcacatgggatacaaatatcttcagtttttgacyactcagagaggtccatccacatcccccttccccaaatttctttgtcaccaattttccaatcatgtttcttccaagtccctgaccagccagtgaaaccatt

SEQ ID NO: 11894 - DNA, 201 bp, Homo sapiens
ggctccaaacaatatccctatctgccactgacatctcaagtcccattggatctgctgggtaatatggtccaagtggcagagcagcttgcatagcagccagracctgtggcagagccttctcttgttctggaccccactcaaaactgacagcctttcaggttactcgataaatgggctggaataacaaacctaaatgaggaa

SEQ ID NO: 11895 - DNA, 201 bp, Homo sapiens
tttgagtgtcactgatcatcttaacagacagaaaacaaatttcatcacttgggccaactccaattattggtgtgctctgttgggaaagattctgaggccaygtcaggcttggggtgagaccatgtttttggagtgctgagtaacatctctgtcatccctgcaaaaactttattcctttttctcaacacttgcccctttccc

SEQ ID NO: 11896 - DNA, 201 bp, Homo sapiens
attagtttgaaaacattttttgagaatttattcctaaaattcagaagcttggtaacacactctgttgaaaaaattatggaaaaagattttctcatacattsctagtagtaatacaaaaaaaatctgacaatactcatggagaaaaatttgataatatctatcaaaatgcctttccacccagaaatcccacttttaggaatt

SEQ ID NO: 11897 - DNA, 201 bp, Homo sapiens
ttccacatgtggaaatgtttctctgagagcagtaatgagtgaagcctgtgcttcaagagttcctgcagtcaggaataatcaaaatctaataaaggcagtcrgtttgagagacactagatttcaaatgtggtcttattttagcaagctagaaaatagggagaaagacttgggttcttatactataaaaatgtttgaaaataa

SEQ ID NO: 11898 - DNA, 201 bp, Homo sapiens
gcgcttcacactggaagctcagtgaaaatttgttcaataaataaatgactcatgatgattctctgtcacttactcttaaaatctcagctgtcaaaacctaytaatcctacttctataagatcattcacttgtatgtcttcttctttgtccactgtctccactttcactttttggttgagtactataaggccactataaagt

SEQ ID NO: 11899 - DNA, 201 bp, Homo sapiens
aaaagtcccatgcagaatggattgatataggaagaccaatacagagggtattataggaagctggaaaatcaacaatgagtacttgaattctatagggataraagtgtggaaagaaagatacgggcagggtggggcgcaatggctcacgcctgtaatcccaacaccttgagaggccaaggtgggcagatcatgaggtcagta

SEQ ID NO: 11900 - DNA, 201 bp, Homo sapiens
taagtcaggctgctaaataaacagctgctgttgatgaaggcaagaagataaacaggcattcttaatggccagaaggttagagagcatcagctgtggggtaragggcacttgccattcctgatcaccaagtcaaacatacctcaggcaatactgactcagaaaccagcatctggttgcccctcattctgtggcaaatactag

SEQ ID NO: 11901 - DNA, 201 bp, Homo sapiens
tctgttgaaaaaattatggaaaaagattttctcatacattgctagtagtaatacaaaaaaaatctgacaatactcatggagaaaaatttgataatatctawcaaaatgcctttccacccagaaatcccacttttaggaatttgcttccaatgggttacagtgctataaatacaaaaagaaaacaattctaggtaaaaaggt

SEQ ID NO: 11902 - DNA, 201 bp, Homo sapiens
aaggaggagtcaccacaagaggcaacatttcctaaaaagaaagggagaccagtgggcaggatgcccttgactgtaggaaagcaagaatatgaagctctgcyatccaccttagcagtagcaatagcacatcttcagatatatacagaaagacaagtgagaaggcgaaggagtaaatcgaagagtagacaaagagatcaaaag

SEQ ID NO: 11903 - DNA, 201 bp, Homo sapiens
agttcaataaatatcttttcatgcctaacatgtactaagggctagagagatcagtataaacacaacagatgtgtaccactctctcaggtaacttacagttyggatttgattcttacgtgataaaagcattccattataggatcatctctctgtgcccacagtactaataaataattctaatccatttgtttatttatttct

SEQ ID NO: 11904 - DNA, 201 bp, Homo sapiens
tcttcagtccaatcaagttgacacttaatattaaccatcacactgagttaaggattttcaactctttattatcagagagagcttgccacaacaggacttcrggttcagaaacattcctctggattccgtgtagcaaaaggtttgcaaaagagtcagatgggaaacagggagtgagaagtggttgaaagagagatcactaac

SEQ ID NO: 11905 - DNA, 201 bp, Homo sapiens
gggccaactccaattattggtgtgctctgttgggaaagattctgaggccatgtcaggcttggggtgagaccatgtttttggagtgctgagtaacatctctrtcatccctgcaaaaactttattcctttttctcaacacttgcccctttcccaatcaaaatgctagatcaacctcaaatttcagcagcttcaaatcatatgg

SEQ ID NO: 11906 - DNA, 201 bp, Homo sapiens
tatagaaatggagaacagattagtctttgccaggggttaaggagaagaggcggccaggtaggaaatggctgtggctataactggcaacataagagatcctygtagtgatggaaatgttatatttcttgactctatcaatgtcaatagcttggttgtaaaatgtgctctagtgctgcaaaatattaacatcgtgggacactg

SEQ ID NO: 11907 - DNA, 201 bp, Homo sapiens
gagtcaccacaagaggcaacatttcctaaaaagaaagggagaccagtgggcaggatgcccttgactgtaggaaagcaagaatatgaagctctgccatccaycttagcagtagcaatagcacatcttcagatatatacagaaagacaagtgagaaggcgaaggagtaaatcgaagagtagacaaagagatcaaaagtaatct

SEQ ID NO: 11908 - DNA, 201 bp, Homo sapiens
tcaagcaattctctgcctcagcctcccaagtagctgggattacaggagcctgccaccacacgaggctaatttttgtatttttagtagagacagggtttcamcaccttggccagactggtcttgaactccaaacctcatgatccacctgcctcagcctcccaaagtgctgggaccacaggcgtgagccactgcgcctggccg

SEQ ID NO: 11909 - DNA, 201 bp, Homo sapiens
ttctcctgagcttcagttttcttataaattttttttaaaaaaagatctttttcaattctataatatcatcatttgggtattttaaatagtactgagtttcrattgagatatattttaaaacttgaaccctgaaaatatctaaaacaaaaaataaattatagaaacattgaatcatgttaatatctgtcaaaactgaaggat

SEQ ID NO: 11910 - DNA, 201 bp, Homo sapiens
ttttctgaagaaagtgatgcccaaaacagacttgaaggaaaaaattgagttattttagtgaggtgttgatggaagatagaaaaaggtaatccaagaagagraaatatattcaaagaccccaaggcatgaaaggatatgattagaacagagtgttaagaaggacattagcagaggtcagattgtgcaggatcttgtgaactt

SEQ ID NO: 11911 - DNA, 201 bp, Homo sapiens
aaaacacagcaaaacctggggggtggggagaagctggcaaaatgcatataaggcattaatagataatacagaaagacctccaagaaatcaatacaaaacayttttagaagtccattttaacttctgtcaacattagcaggacatctaatttgaatgcccactactgtgctcattcgagaaagttcaataaatatcttttca

SEQ ID NO: 11912 - DNA, 201 bp, Homo sapiens
acactttgagtgtcactgatcatcttaacagacagaaaacaaatttcatcacttgggccaactccaattattggtgtgctctgttgggaaagattctgagrccatgtcaggcttggggtgagaccatgtttttggagtgctgagtaacatctctgtcatccctgcaaaaactttattcctttttctcaacacttgcccctt

SEQ ID NO: 11913 - DNA, 201 bp, Homo sapiens
ctcttgcaaatctcatctcgggaatagaaaacatcacatggctccaggtggggaggaataaggaaatactaaaaagattgggcagagtaaagcaatcttayctgttttctttttttttcttcccccccccccttccccccactgtcagggtcaggacagcataagacatagtgggatgggacaaggatgataagcatctga

SEQ ID NO: 11914 - DNA, 201 bp, Homo sapiens
aaacagacatcaacccaaactggacattgtcgataagtaaggtatgtaaaatgataccaaacaggtgtaattcgttttaaggtaaacatgggttgtatcawgtggtgttaatctttacttctggggaatatcaagcctgggaaaaaaaataaaaattgaatgagctgtttcttccttcttccttttaagttacttctgtgt

SEQ ID NO: 11915 - DNA, 201 bp, Homo sapiens
ttgtccaagggtcgtgaaccagcaaggagggagacttcgtatcaccacagatggtaagggattggggagcagcctggcatggaacaagtgtccactgagcrgccaggaaagcctgtgaccatggtgaggggaggaggcagtgcagctgacagccacagttgatcagctagtccagagagatatggccaggcaggctactga

SEQ ID NO: 11916 - DNA, 201 bp, Homo sapiens
cctaataccataaaaaccctagaagaaaacctaggcaataccattcaggacataggcatgggcaaagacttcatgactaaaacaacaaaagcaatggcaasaaaagccaaaattgacaaatgggatacaattaaactaaagagcttctgcacagcaaaataaactatcatcagagtgaacaggcaacctacagattgggag

SEQ ID NO: 11917 - DNA, 201 bp, Homo sapiens
aggggagggatagcattaggagaaatacctaatgcaaatgatgagttgatgggtgcagcaaaccaacaaggcacatgtatacttaggtaacaaacctgcayattgcacatatgtaccccagagcttaaagtataatttaaaaataataataataataaaaatacacatatattcaaatttaagaatgcttctttaggatga

SEQ ID NO: 11918 - DNA, 201 bp, Homo sapiens
tacttcttgctcactggatccaatcagcataatgttatcaatttaatagaccggtgtgatatactgtggaagggacaaacaatcaggatctctgtgaatgmgattatgataaaaagctggagagttgatatacccctgaggtaggacagtgaaggtatattgctggccttgccagctgaaggcaaattgcttctggtgggc

SEQ ID NO: 11919 - DNA, 201 bp, Homo sapiens
acagggagagtccccaggtccaggagaatatttttgaaagttttcaggcctggaatcttaatcgaggtcttctcttgagtcctggtagtatcatcatatamataaccaacttaggcaattaaatgctaatagccttataagaagttgaaactgaaacatacttctgtaaatgtaatctacatttactatactagatactac

SEQ ID NO: 11920 - DNA, 201 bp, Homo sapiens
cttacataaatatataattgtttattttgtcaaaaaaaaggaagactataccagaaataaatataaatggttcactctttggggtcagaggagaggaaatyggtggtaacacaagttgggaggcatataaggcttctcaaagtacaaatttttaatagttttgagggtttgggggatgtataaatattttacgtattcaaa

SEQ ID NO: 11921 - DNA, 201 bp, Homo sapiens
ccttaataaaaattaaataaaattgaatcacagtcttcactataaagcataaaactataaaatgtttagaaaaaaattaggagaaaattttcaggatctasttctgagcaaataattcttagacttgaaaccaaaagcacataaaaggaaattggtaaattgaacttcatcaaaattacacatttttgcttcacataagac

SEQ ID NO: 11922 - DNA, 201 bp, Homo sapiens
tcaaaaacactataaacaaataaaaataaaattataaagagtgctcaagtaacccacagaaaggtaggaaaaagaaaacataaatgaaaaacagaacaaaygaaaaataaaaccaaaatgacacagttaagttataacatatcaataattattttaaatataaatgtactagttaaaggataaaagaaactgaacttataa

SEQ ID NO: 11923 - DNA, 201 bp, Homo sapiens
atttaaaaggaggtaagatttctatacttcacccgaactggtaaaatgacagtatcagtagattgtaatgttatgaatatatatatattatatatatatawatataatatatatatatatttaatatatataatatattaaatatatatatttaatataatatatatataatatatatataatgaaatagctagagttaaa

SEQ ID NO: 11924 - DNA, 201 bp, Homo sapiens
gccagagaggccaagtgagagcctagacttccacactcctgatgccataccaaggcacccgaatatctccaccagggtggagtcagagagggttaaatatraagctgggctttcatcccccaagcaggtaatgagctcccaagcccacacagtccatggagaccaagcgtaaagcctggactgccactcccacctagtagt

SEQ ID NO: 11925 - DNA, 201 bp, Homo sapiens
cttatggagctatcgagaacccttatctggatgtgtctaagcagagattggtaaagattgtcttgttttttattctttaaaaatccatgtaattttttttwttatactttaagttctagggtacatgtgcacaacgtgcaggtttgttacatatgtatacatgtgccgtgttggtgtgctgcacctattaacttgtcattt

SEQ ID NO: 11926 - DNA, 201 bp, Homo sapiens
gaaggaagttcatttggctaaaatgagttccttgacagtgcagtaggtagcaggatggcagacaaatgtagacaataagaatacccaggtcactggtcagkccatgtctaagaactgtattcagggtcgggtactacattttaagtagagaatgtgataaatcagaaaagcgggacaaggaacgataaagggtctgaaaat

SEQ ID NO: 11927 - DNA, 201 bp, Homo sapiens
gttacgaagggattcagagtagaagcataatcgaagaaggaaggaagttcatttggctaaaatgagttccttgacagtgcagtaggtagcaggatggcagmcaaatgtagacaataagaatacccaggtcactggtcaggccatgtctaagaactgtattcagggtcgggtactacattttaagtagagaatgtgataaat

SEQ ID NO: 11928 - DNA, 201 bp, Homo sapiens
tggccacagctcagtaagaacctacgttgtaaaaaagtaggccaaaaaccaacataatcttgtactatgttaataggcattaaatgctcagatgaatgccwggcatgatctctagactaccatgtatggtgcctgattccactcctcttgcaaatctcatctcgggaatagaaaacatcacatggctccaggtggggagga

SEQ ID NO: 11929 - DNA, 201 bp, Homo sapiens
gacaaggaaaaaagtctgtacattttcagtacagacacaatattttttaaatattttagatctatggttgattgactccatggatgcagaacccacagatrtagaaggctgactgtacacacatttcatcaactcatattaaataaaaaattaaaactttgtttacaaattagatccatattattgccagagaaaaatcca

SEQ ID NO: 11930 - DNA, 201 bp, Homo sapiens
cagaattcaagacaaaaataacaatagaagcagtaagaagaccaagaaacacaccgtgtatcaattaatgagaaaacaatctacaggaaatatataatggwtacaaaaccatgagttgaacagtcaagatcaaaatacataaatcaaaaacttagaaattcaaggagaactcagcagaaacataatgttattggaataaca

SEQ ID NO: 11931 - DNA, 201 bp, Homo sapiens
gaaatatcagaattcaagacaaaaataacaatagaagcagtaagaagaccaagaaacacaccgtgtatcaattaatgagaaaacaatctacaggaaatatrtaatggttacaaaaccatgagttgaacagtcaagatcaaaatacataaatcaaaaacttagaaattcaaggagaactcagcagaaacataatgttattgg

SEQ ID NO: 11932 - DNA, 201 bp, Homo sapiens
agaaatatcagaattcaagacaaaaataacaatagaagcagtaagaagaccaagaaacacaccgtgtatcaattaatgagaaaacaatctacaggaaatawataatggttacaaaaccatgagttgaacagtcaagatcaaaatacataaatcaaaaacttagaaattcaaggagaactcagcagaaacataatgttattg

SEQ ID NO: 11933 - DNA, 201 bp, Homo sapiens
aatactggagtaagaaatatcagaattcaagacaaaaataacaatagaagcagtaagaagaccaagaaacacaccgtgtatcaattaatgagaaaacaatstacaggaaatatataatggttacaaaaccatgagttgaacagtcaagatcaaaatacataaatcaaaaacttagaaattcaaggagaactcagcagaaac

SEQ ID NO: 11934 - DNA, 201 bp, Homo sapiens
tggaatactggagtaagaaatatcagaattcaagacaaaaataacaatagaagcagtaagaagaccaagaaacacaccgtgtatcaattaatgagaaaacwatctacaggaaatatataatggttacaaaaccatgagttgaacagtcaagatcaaaatacataaatcaaaaacttagaaattcaaggagaactcagcaga

SEQ ID NO: 11935 - DNA, 201 bp, Homo sapiens
agaggatagttaaaaaaataaagcatcagttaagggcaaataacatttggaatactggagtaagaaatatcagaattcaagacaaaaataacaatagaagyagtaagaagaccaagaaacacaccgtgtatcaattaatgagaaaacaatctacaggaaatatataatggttacaaaaccatgagttgaacagtcaagatc

SEQ ID NO: 11936 - DNA, 201 bp, Homo sapiens
tatgcagcaaagacagtgtatgattagggaaaagctcagccacagctatttggatgtggcctgaggacaagtatctattgtgatccattgaagctactaawtaatctttttacacaggtgagaaaatgcaatttttggtgctgctaattttaattcttgatacaggatagcagcaataccgaagaagccttacagccaaat

SEQ ID NO: 11937 - DNA, 201 bp, Homo sapiens
aactgggatatttgtacacagtcctcaggagtaggttagagcactagctacaacagggatataagttggaggagagattttttgtttgtctggtttttaaratatgatagacaatgacactagtagaatacatttctcatcatgttccacagcttgccctttgtgctgctgttgtgcaatccaccaggtaaacatgtttaa

SEQ ID NO: 11938 - DNA, 201 bp, Homo sapiens
acaagtcacatggccacacaagacagagaagtacaatgctactgtgcatccagaaggaagagaactgggatatttgtacacagtcctcaggagtaggttaragcactagctacaacagggatataagttggaggagagattttttgtttgtctggtttttaagatatgatagacaatgacactagtagaatacatttctca

SEQ ID NO: 11939 - DNA, 201 bp, Homo sapiens
ccatcctggctaagatggtgaaacctcgtctctaataaaaatacaaaaaattagctggacatgatggtgcatgactgcagtcccagctactcaggaggctraagcaggagaatcgcttgaacacaggaggcagcctggccgacagagcaaggctctatcccaaaaaaaaaaaaaaaaaaaaggaagaaagaaagatatgga

SEQ ID NO: 11940 - DNA, 201 bp, Homo sapiens
tggaaaatcaacaatgagtacttgaattctatagggataaaagtgtggaaagaaagatacgggcagggtggggcgcaatggctcacgcctgtaatcccaayaccttgagaggccaaggtgggcagatcatgaggtcagtagatcgagaccatcctggctaagatggtgaaacctcgtctctaataaaaatacaaaaaatta

SEQ ID NO: 11941 - DNA, 201 bp, Homo sapiens
ggattgatataggaagaccaatacagagggtattataggaagctggaaaatcaacaatgagtacttgaattctatagggataaaagtgtggaaagaaagakacgggcagggtggggcgcaatggctcacgcctgtaatcccaacaccttgagaggccaaggtgggcagatcatgaggtcagtagatcgagaccatcctggc

SEQ ID NO: 11942 - DNA, 201 bp, Homo sapiens
atagaaagatttttccaaaagtcccatgcagaatggattgatataggaagaccaatacagagggtattataggaagctggaaaatcaacaatgagtacttsaattctatagggataaaagtgtggaaagaaagatacgggcagggtggggcgcaatggctcacgcctgtaatcccaacaccttgagaggccaaggtgggca

SEQ ID NO: 11943 - DNA, 201 bp, Homo sapiens
ggcctccctattcaataaattgtgctgagataaatggctagccatatgcagaagattgaaactgaaccctttccttacactatatacaaaaaccaactgaygatggattagagacttaagttaaaacctaaaactataaaaaccctggaagatagcctagaaaataccattctagacataggacctggcaaagattttatg

SEQ ID NO: 11944 - DNA, 201 bp, Homo sapiens
tattttcaaatagctaagtaacagcaccattagcaaaaatattgaattttgcagaatattactctcagtgtcacctggcatgggatgagacatactactcwgtgtgaattcctaagactgaatgagggctttgaatttgaataaaggttcacaaacttcacaaaaatgtgtccttccttctggcatgaactttgagaaata

SEQ ID NO: 11945 - DNA, 201 bp, Homo sapiens
cgaatttttttcagaagggaaagtaaaacatcatccatgtctggcaagaatgctgaggcagatacagcatgtgtttatgaacacgggaatgatgacttackcatgtttggagaaagaagaagtatatttatttttctttgcaatcatctctatgtatttttgaggtacaggaacacacatttgagagccctgacacagaag

SEQ ID NO: 11946 - DNA, 201 bp, Homo sapiens
ccacagcccagcagggcagcagtggttgtggtaggcgctgcagaggggttgctgtttcagcccctgaaattagtgcctagagagctggaaattccagtagkctctgatcagaaggtccggaactggaaataacaggagtgagaagttcataaaagagaaggctacaatcccaagggaaatttgcacaagagcccaccactg

SEQ ID NO: 11947 - DNA, 201 bp, Homo sapiens
aaacattgaatcatgttaatatctgtcaaaactgaaggatagtagaaatatgtttggagctaacgaattttcatatatttttttgtttccactctgaggtytcttgagtccttattcatttgcccaagaaagcttaatttagaattggcctgactccgagtctttaggattggttaggatagtcctaagtgctacttaaat

SEQ ID NO: 11948 - DNA, 201 bp, Homo sapiens
acatttgggttggttccaagactttgctattgtgaatagtgctgcaaaggtggcaatcttaacttccagtttagtggaatcattgttgtgtctcctggtgwcagcattcctccctctggagttaagacctctaggccagcagaatgtcgggtaacagaaagcaaaaattttgctagtgagtcactgggggtgatggtgagt

SEQ ID NO: 11949 - DNA, 201 bp, Homo sapiens
aagtacagcaaaattaaaaagtttttaaaaaatttttaacaaatatttcttgggtacctactaaacctcaggcattatgttggagactgaagtcacattasagaaaacagacaaaatgcagactctcacagagcttacattttggtctggaagaaagaaaataaaaagcaaagtaaacagaattataaaagattgtaagtt

SEQ ID NO: 11950 - DNA, 201 bp, Homo sapiens
aggctctaaggagggagagggtggagattgagctcaaccatgtgtgcaataactcaatcaatactgcctacgtaatgaagcctcagtcaatactctggacrctgatgcttggtcaagcttctggagttgacaatactctgtgtttttctacatatgaataccagaagggtaacacatccttaagaacacccctgtgcattt

SEQ ID NO: 11951 - DNA, 201 bp, Homo sapiens
atctcactatgttgcctaggctgctccaactcccagccttaagagatcctcccacctgagtctcccaaagaacttggcttacaggcatgtgccaccttgcytggacagaaaaagcttttaataactaattctatttaggaaagtctgtaaataatgatggctttcatttattgattgcttactctgtgcaagacactatac

SEQ ID NO: 11952 - DNA, 201 bp, Homo sapiens
gttctggtctaagctagaacaaaaattaggtgacatattcaccagtaagcgctaactataggtgggaaagggcttcaagatgctaagtagaggaaaacagscaagagtcaagaatctttaaaaagacaaaaaaaaggaaatgagattcatcatattattatttttatttatggctacaagaatattaagaatgaattagag

SEQ ID NO: 11953 - DNA, 201 bp, Homo sapiens
gaattgccacctataatgctggtgattgttcacaaacactacgcacatatctgtagcagcttcagcattgtgcaggtgcagtaacacacacagactgcccraaaatatttgttaagctctacaaaagagcaaccactgacaagagataatactataaactgaggaattctctcactcactgtagaaaatctcatagaaaca

SEQ ID NO: 11954 - DNA, 201 bp, Homo sapiens
cataatggatcgtaacacattgaattttttaaaattcttgagcctgtagtgatactggaggaaggagtcttttgtttacacaagaatgccagaaaataaaygtaaaagggataataaaattaggaaatgactattttgcagtctctaatgtagttcagacaaaggtcatcagtgcatgctaaaactactgggtgaaagtgt

SEQ ID NO: 11955 - DNA, 201 bp, Homo sapiens
ttcctggagaaatggctaattccagattacagacagatagtgtacaaggtgaaccctgaacattctgtgtcagaaagctaaggaagtgcccagagaatgayaaatacaatcaaaagaacaaagcggcaagcatgaaaggccaaatatgagataatttgggaatttaaaaaatgaacataatggatcgtaacacattgaatt

SEQ ID NO: 11956 - DNA, 201 bp, Homo sapiens
gctacttggggggctgcagcagaagaatcacttgaacccaggaggcggaggttgcagggagccaagatcgtgccactgcacaccaagctggtcaacagagygagactctgtctcaaaaaaaaaaaaaaaaaaaaagaacgccaattcaatgatggcacatcgtcagttgtaagatgcaaactaatttaaagatgttaaaaa

SEQ ID NO: 11957 - DNA, 201 bp, Homo sapiens
tgtctgactgaaagtagtgtaatagtattcatagctgtgacagggaacattttaggagtaaagaaagtcaactctttttattttatttatttatttatttwttttgagatggagtctcactctgtcacccaggctggagtgcaatggcaccaatctcagctcactgcaaactcctcctcccgggttcatgccattctcctg

SEQ ID NO: 11958 - DNA, 201 bp, Homo sapiens
tcagtgtctgactgaaagtagtgtaatagtattcatagctgtgacagggaacattttaggagtaaagaaagtcaactctttttattttatttatttatttwtttattttgagatggagtctcactctgtcacccaggctggagtgcaatggcaccaatctcagctcactgcaaactcctcctcccgggttcatgccattct

SEQ ID NO: 11959 - DNA, 201 bp, Homo sapiens
catacccacaattgaattttcttttggtaatttgaatattttacatttaacttccttgctcacaaacgtgaaggtataacttaacattagagacatttctrtaagaagaaatcaaaaaatgcaaactaaagtttagcaactcaggaatttggttaggtttaactatcaggagccagactccaaaagtagactaaagtgtgg

SEQ ID NO: 11960 - DNA, 201 bp, Homo sapiens
atagttgggttttctgataatttctttgcactgtttttgtgagtataatttctttgtactgttctacgttgatactgaataaatacaaaattaaaacataracacatatatgaagcataatgctaaaatcaatcaagtaactcatgttgtaacaaaccaatagcttaaataactgttcaatttcatgaattagtagaggat

SEQ ID NO: 11961 - DNA, 201 bp, Homo sapiens
aagcgattcttgtgcctcagcctcccaagtagctgggattacaggtgcccgccaccacacttggctaatttttgtatttttagtagagatggggtttcacygtgttggccaggttcatctcgaactcctgaccttaggtggtcctcccacctcagcctcccaaagtgctgggattacaggcgtgagccactgcgcccgggc

SEQ ID NO: 11962 - DNA, 201 bp, Homo sapiens
gagtgcaatggtgcggtcttggctcactgcaacctctgcctcctgggttcaagcgattcttgtgcctcagcctcccaagtagctgggattacaggtgcccrccaccacacttggctaatttttgtatttttagtagagatggggtttcaccgtgttggccaggttcatctcgaactcctgaccttaggtggtcctcccacc

SEQ ID NO: 11963 - DNA, 201 bp, Homo sapiens
ctcactgatgaaaaatgaatgaggacatgtgttgaacaatgaaatacggtttaataaggtgtctcatgtgaacctgcataagacagaaaaaagtcttgctytttaaatccattaaacaataacaaagaaattggtgtcagaaaacttagatatgcgtattcagctatattaagtaaaacaaagaccaaaagaactggaata

SEQ ID NO: 11964 - DNA, 201 bp, Homo sapiens
ggaggtggagggttccagggtgatcttgaactcctggcttcaagggatcctcccacctcagcctcccaaagtgctgagccaccgcgcctggcctatttctwaccattgcatgtgtatttacaattttctcaaaagaaaaagttgaattaagagataatactcagaagccatccaaaacaaaataaatacaggttattaaca

SEQ ID NO: 11965 - DNA, 201 bp, Homo sapiens
ttataattacctgtgtggcctcctcaccatgattctctattagattgtacaatccttaaggacacagagtttcccatttcttttttttttttttttttgaraccgacttgcactcttgtcacctaggctggagtgcaataacatgatcttgactcattgcaacctccgtctcctgggttcaagcaattcttctgcctcagc

SEQ ID NO: 11966 - DNA, 201 bp, Homo sapiens
tggctgttggaggtggtgattactccatttctgtgaggaagatagcacagctttggtacctggatgacttaagcacattcaggcccaaacacacaggctgsagtatccagaggaaatgtgggggcagaagtaatgtgtctggcagggaagtggcactggtgtatcttggagtggtttcagcatctgcataggtatggatgt

SEQ ID NO: 11967 - DNA, 201 bp, Homo sapiens
tgagacaagcctttttgaaatttgaaagataaaattcctttcaaagatgccacttgtcagcctaataagaaaatcatctgtactttttcctacatattttyctgagtattaaactttttaatcaaggccatgtgagcattgaagtattataaagctcatttgttttacttaggaaagtctattcatctgggatatcacaca

SEQ ID NO: 11968 - DNA, 201 bp, Homo sapiens
ctctagtgctgcaaaatattaacatcgtgggacactgggaaatgaatacatgggatgtttctgaactctttattacttcttcttcctttttttttttttttgtttgtttgtttgattttttcagtagagatggtggaggtggagggttccagggtgatcttgaactcctggcttcaagggatcctcccacctcagcctccc

SEQ ID NO: 11969 - DNA, 201 bp, Homo sapiens
tgctatggctgctctacaaaacattttggcagtttctttaaaaattaaacatgcaattaccatgtggcctagagattgtactcctgggcacattttttacrccagagaaacagagttatgttcacaccaaaatcctgtatccaaatttttatagtggctttattcataatagcctaaacctggaaaaaacccaaataccct

SEQ ID NO: 11970 - DNA, 201 bp, Homo sapiens
aatgttcaatatcaataaccagtagagaaatacaaataaaaaccacaatgagctatcactgcacacctatcagaatggcttacatgaaaaaatagtgacamcaccaaatgttggcaaggatacagagaaactggacagatcagctgttggggatttaaactgctatggctgctctacaaaacattttggcagtttctttaa

SEQ ID NO: 11971 - DNA, 201 bp, Homo sapiens
gggaggaaccagtctacctgatttcaagacttaacagccacagtagtcaatcctattgtatttgtgtagggctagacatacagatcattaaaacagaaccyagaaatagacctatacaaatatttctagcttctatttaatgaagttacaaaaacacttcaaaagaggaaaggtagccttattgataaatggtatcaggca

SEQ ID NO: 11972 - DNA, 201 bp, Homo sapiens
ctaagtcctattgaatcagaagacgcatgttaacaaaatccccacacagttcatattcccagtacaatatgaggattgggcaacgggcttggtgtggaagrggaactgagtatggaaataagaagcctaaaaattccacacagtaccgctggcagaacaatttggaggacatggttcacagtcatttcctaggtatagtta

SEQ ID NO: 11973 - DNA, 201 bp, Homo sapiens
tgtgggctcctatgtctgcatacgtcatcatgctggaggctggaagagatacacagttgtgagtccaagttttggccttcaaggtggcatgcattccagtsaaagaaaaagacccacacaccagacacaaaagggatcatgaccggggccttgctgctcaaaaggtgtttctcagaccagcatgctcccttggagtttgtg

SEQ ID NO: 11974 - DNA, 201 bp, Homo sapiens
accagtattgtgggctcctatgtctgcatacgtcatcatgctggaggctggaagagatacacagttgtgagtccaagttttggccttcaaggtggcatgcrttccagtgaaagaaaaagacccacacaccagacacaaaagggatcatgaccggggccttgctgctcaaaaggtgtttctcagaccagcatgctcccttgg

SEQ ID NO: 11975 - DNA, 201 bp, Homo sapiens
agattagcacgtattgagaaattaatctgcccactgaataatacaagaaaaaattgtgaccccagaagaattagcatcacaggaagatcacagaatgaaayacattttgattctgaaaaaaaaaaacttgcgcaaacttaaaattcacaacctatttcaagatatttctcatcggcaaccttataactatgtagcataaaa

SEQ ID NO: 11976 - DNA, 201 bp, Homo sapiens
gctgaaaactaaacaacaataataaaagaaattaaagaagatttcaatacatggagaaatacaccatgctcatagatcagaaaactgaacatagtcaagayggcaattctctccaaaactgatagatggttaatatcattcctttcaaaattccagtaatatttttatagatatggacaaaagaattctagaatttatgtg

SEQ ID NO: 11977 - DNA, 201 bp, Homo sapiens
ataggtataaatctaacaatacatgtacagtattgatatgctgaaaactaaacaacaataataaaagaaattaaagaagatttcaatacatggagaaatayaccatgctcatagatcagaaaactgaacatagtcaagatggcaattctctccaaaactgatagatggttaatatcattcctttcaaaattccagtaatat

SEQ ID NO: 11978 - DNA, 201 bp, Homo sapiens
cctgtctcattttttttttcaatttcaaagtgcatgtgtatatatgtatatacaaatgcaggcactaccacaaattggttttgtattatacacaaacattkttaacatgtcattcacaccaaatattttatggctgctcaatgttcctctgaaacatggttgcatcgtatgaatttattataatttaaccaaattttactt

SEQ ID NO: 11979 - DNA, 201 bp, Homo sapiens
cttgccagagttattggtttgatgatcagtgcagaacctagtccaaaccagtcagcatcctgactatcccctggtaaaagccaatgattcaagggcaggcmtgtgtctggcaatagcctgatgggagtgaagttcagaacatttgatctatgactgttcaaaaaattctttcttccttccccaagtgaacaagggagctta

SEQ ID NO: 11980 - DNA, 201 bp, Homo sapiens
aaaccaatgagattgattcccaaactccaaggtcatggctgctgctaattcataggtacctctttgtgaactagaaaaataaaatgcctttttgagtgacrcagacctattagtgcacagggttttgttctactggactctgatcaatctgagccaattgaagtaattctattccccttgccagagttattggtttgatga

SEQ ID NO: 11981 - DNA, 201 bp, Homo sapiens
gacgcagacctattagtgcacagggttttgttctactggactctgatcaatctgagccaattgaagtaattctattccccttgccagagttattggtttgrtgatcagtgcagaacctagtccaaaccagtcagcatcctgactatcccctggtaaaagccaatgattcaagggcaggcatgtgtctggcaatagcctgat

SEQ ID NO: 11982 - DNA, 201 bp, Homo sapiens
tcattcagatttctggccttatgtgctgtggccagaacccatccagatgacatgctgtggccctcaactgaggccttgcccatcctgacagaatatcccaygtggcctcttatgcccacctctaagctctgaaacatgcttgggagaaatctcctgcataggaaccatagacggagatgtttctgcagtatttaaatgaca

SEQ ID NO: 11983 - DNA, 201 bp, Homo sapiens
aagagccaccaaatgttaaatgtgagaagagatcttagaagtgatttagctcactctcccacctaacatacagttagttccctgtcactgaagaccatggrctgaggcaagtcagaagttccccagcaccttcattcagcaagaccaaattaaaggcatattagtcacatgcagaaaagttgaagcagctggagcagtggc

SEQ ID NO: 11984 - DNA, 201 bp, Homo sapiens
gaatgcaactgtcttacagctacaatgaagatgctgctgaaatgaaagcttcatgagggcagaatcatggcttccttgcacatagtaagcattcagtaaayacagacatgcagagtttaacatattttcagtagctgaaacacatctctccttagctgtcatatgaaaatatttattaacattgtcaaggtaccatatccc

SEQ ID NO: 11985 - DNA, 201 bp, Homo sapiens
agttgactaaaaaaattaaatccaactttatggaagacagccatcaaaatacaatctatttaaggtgagaggatagttaaaaaaataaagcatcagttaarggcaaataacatttggaatactggagtaagaaatatcagaattcaagacaaaaataacaatagaagcagtaagaagaccaagaaacacaccgtgtatcaa

SEQ ID NO: 11986 - DNA, 201 bp, Homo sapiens
cttcatctcttattttcatttatcaaagggatggcactattatgagctatgcatttggggttaggagattatttttttttaggaagcatcattgactttargcagagaagaccaataggatggagccctgagagagaatacaaggaggaactggctacctgctgaaacctcttgaacctgtctttcataggtgaaatggtg

SEQ ID NO: 11987 - DNA, 201 bp, Homo sapiens
taacaataaattgagtgagtcaaaacttcaaaaaaaatccatgtaatttctcctctctttcatttattcattccttttactggatacctacttggatcaakcctatactaggtgctgaggagaccaagaagaataaaacacaatctgacaaggtactctcatcctctgaagaagattggcacaatataaaaagggtgatag

SEQ ID NO: 11988 - DNA, 201 bp, Homo sapiens
ttctcttccacttaacttcattaaatccaactgaacatacatttagtgtcttctaaatactacttgttatttagtcctgtgatgagctcagctacctgagkttgcaaaatgcttaactgtggagttgttggacaactaataattctgagagactcaagccaggctaagtggggttggcagggggtagtgggagggtcctca

SEQ ID NO: 11989 - DNA, 201 bp, Homo sapiens
gagctattgggggcagaatgccctatttcacttcatttttgctgaagtgcagattgactgccaaaaccaagacaatctaatccaagttctactcactagtktgttgaaaccttaccaagacacagaattcctgtgggaagcaggacataccctcccccagcagtaagcttacactcaaaattagcccggctgccaagtgta

SEQ ID NO: 11990 - DNA, 201 bp, Homo sapiens
ttgtcattatatcattgttgtaactctcaccacatagatagtttacctctagctcaggctgagatcaactctgtctttcatggttgacatggatgaaaacraacggaagcatatcatagtatcactccaattatccttggagctggccaaaagaagggaccctactgcttcatctttgtattctgtttaccagttcagttt

SEQ ID NO: 11991 - DNA, 201 bp, Homo sapiens
acatggaaaataatgtttaatactaagaaaaaaggactcgaaagtgtatacagcttattactgcatctttatggaaatacattcataaatatttaatgcarttatatgataaaaggcaataagcaagctgagaaaaaatagttgggttttctgataatttctttgcactgtttttgtgagtataatttctttgtactgttc

SEQ ID NO: 11992 - DNA, 201 bp, Homo sapiens
ctccacagcattttgaaattcatgttgtcactgttgtatttctaacattttccacagcagctaaaaatctcatgccataaaaaaagcagacaggggatgastacaatacaaaatctgtaggaaactctcaagaatgtaagccttttatcagagaggtactggtttacagctcagcagacttgtcgaaagagggttgtaaca

SEQ ID NO: 11993 - DNA, 201 bp, Homo sapiens
gctgaccaagttgcacccaaggattggaccagccacccactgtggaaaccagtgaaagaccacaggagaacaggtgactcctcctcctcccagcatcaagrggatcactaggacagacaccacgttggaaagaagtaagaattgaaaggaagaagtcgctataataaggacttaaatttagaattcccggaatatttacct

SEQ ID NO: 11994 - DNA, 201 bp, Homo sapiens
aaaacctaggcaataccattcaggacataggcatgggcaaagacttcatgactaaaacaacaaaagcaatggcaacaaaagccaaaattgacaaatgggawacaagtaaactaaagagcttctgcacagcaaaataaactatcatcagagtgaacaggcaacctacagaataggataaaatttttgcaatctatccatctg

SEQ ID NO: 11995 - DNA, 201 bp, Homo sapiens
tggctcacctacctcctgaataagctaaaaatatttccccaaggagtggctgggatctgcagcattccaaggaattaagaattctggtttgatccttttgsttcacaggatccctagcagcaatcctcaagagcctcagcagattggagagatgcctctttgattctgtcccagagctaaagattggaataactgtccctc

SEQ ID NO: 11996 - DNA, 201 bp, Homo sapiens
caccgcaccgggcctgtttaatataaaaatgtcttctgcaatttttcttttttctttttgagacagagtctcactctgttgccaggctggagtgcaatggygggatctcggctcactgcaacctccacctcccgggttcaagcaattctcctgcctcagcctcccgagtagctgggactacaggtgcaccaccaccacatc

SEQ ID NO: 11997 - DNA, 201 bp, Homo sapiens
tgtcctctcactttttcctcctctctccacctctgcctctctcccctgtacattcccatctctctttgtactgaattcctcttggcaagcagagggcctgygataaaatatgaatgagccgtctgtgcacggcaggcatcctcgccaggagaggcagagtccatggagcagccgagacagctgtggaagagaaggtgccat

SEQ ID NO: 11998 - DNA, 201 bp, Homo sapiens
cgccaaccccggagttgggggcggggggggccctgagggccgccggacccccgacccccaacctcgcctggaccttggcagacccctttcccacctctctycctttcactttctcaccgtcctgtcaccctttcccatctttttttctcagtgaaacaaggcccagtcaccagcataacaatccagtgagcgacctccgga

SEQ ID NO: 11999 - DNA, 201 bp, Homo sapiens
gaaagtatgagagagctgagattcagagttgagaaagggtacagaaaggtggaaggtaatgcaaaggaaacaacagaaaaggaagacggcaggcagcagakaacagccctcaaggaagagagaaggggtttgtattgtagcaggagtgaaagtagattcgattttaaagaaaaaagatctgaatttgattgttagatgcaa

SEQ ID NO: 12000 - DNA, 201 bp, Homo sapiens
ctcaattgctcttctgtttttctactttgtatgttaccatactatgtccattttaaaacatcacattcagggcaacaaataggtgttttcctgaattaatytgcctataaaaactaggtacagtgtggtctagcacaatgggcattcaaagaattcttttttggtttccatggacactattgctgacttcatttcccagcc

SEQ ID NO: 12001 - DNA, 201 bp, Homo sapiens
gcgcattctccgaattcctgcgggcggagcctgggcccgggtgggggcgcggcgcgcacaaacctccaggggcaccgccgtgaaaggggggagcaagttgkgggggatgcgccttcactgccccacttggtcccttccctacgaggcctcctgccgcaaaaaaccgaggttcaaatgcttgagaaacggactcacgagata

SEQ ID NO: 12002 - DNA, 201 bp, Homo sapiens
tggaataggaaagagtgtgggggtaggggacggggactctttgtctgcagttggaatgcgcggaggggcatggtggaatgtgtcgcgtcccgggaccggasgacaggaggcatgttctgcgctagcaccgtgactttgttcccagcgtggggactgtgggagagatggagagagactggtacagaaatggtgagacaagga

SEQ ID NO: 12003 - DNA, 201 bp, Homo sapiens
tgggactaatctctactttgagagggagggaaagagatatagtgtgtatgtagaagcagtgaaaaggagtgaggaaaaggtttgggactaatctctacctyaagggtaggacagttagagggatagacaccccctggtgttgggaaatgagatttttctcatttcaggtgactgtggagatcgaaggcctggttttagggc

SEQ ID NO: 12004 - DNA, 201 bp, Homo sapiens
agaagactggtgatacagagtaagtattaagaggaagaaaagaaatgccgtgtagaggaaattgcaaatgaaaatgatcaggatggaaaagaggctgataytgactattttaaaaggatcaagaataaggaaaagaaaccctggctgaagcagccgggcgcggtggctcacgcctgtaatcccaccactttgggaggctga

SEQ ID NO: 12005 - DNA, 201 bp, Homo sapiens
gttaggattctttttatttatttattttattatgattttgttatgagacagggtctcgctctgtcacccaggcttgagggcagtggcatggtcatgcatgytcactgcagcctccaactcctgggcttaagtgatcgtccagcctcagcctcctgagcagctgggactacaggtgcacatcaccatggccggctaattggt

SEQ ID NO: 12006 - DNA, 201 bp, Homo sapiens
ttgagcttttccagaagaaacttcactactgaaatattccaagaggacttgatgctgccacaaagagaagagaatgaataaagttgtcggctttgtaagakccagacaaacagagatacccagcactaatcaactttgtggcaaatccctccacagcctaagaaggtatggtgagatcaaagccttagtctcattgctgta

SEQ ID NO: 12007 - DNA, 201 bp, Homo sapiens
tgccacaaagagaagagaatgaataaagttgtcggctttgtaagagccagacaaacagagatacccagcactaatcaactttgtggcaaatccctccacarcctaagaaggtatggtgagatcaaagccttagtctcattgctgtattggagcatccccctctacttccctgtccttagcaaagtaccttctaattctttt

SEQ ID NO: 12008 - DNA, 201 bp, Homo sapiens
catgcctggctaatttttgtatttttgtagagacggggtttcaccatgttggccaggctggtcttaaactcctgatctcaggtgatctgcccgccttgacsttccaaagtggtgggattacaggcatgagccaccacgcccagccaagtgaacatttcctgaagtccccttctcttgcacttttttttctttccttttctt

SEQ ID NO: 12009 - DNA, 201 bp, Homo sapiens
gctgagatttatagacctgtgagctgctttctgcgctgtgaaatctaattccatcctgtcggcttggaagcctttcctgcctcaaagaacccacagctcarggcaatgcctagcctggtacctttctgcctcccaccttccaggtcctcccttgagctggaaccacggagagtcctgaccagccacagactggggtgagca

SEQ ID NO: 12010 - DNA, 201 bp, Homo sapiens
atccgcccaccttggcctcccaaagtgctgagattacaggtgtgagccactgtgcccaggcccaaaagttttttatatgtaagtccatgttaaaggatgaytcaccaaaatgcattgcacactactcaaatgaaaggaagacaaagtctctacctataaggcacttaaagtgtatttcagatgggaatgtctaaagaatat

SEQ ID NO: 12011 - DNA, 201 bp, Homo sapiens
gaacttggtaaatgttagttgattaaatattagtcaaggatgacaaggtggaccccagggagggcagaaccgtttccgatgggtcagtgtgattcagctaygggaaaggcgatcgcagcgacgcgggaagcagagatcggcgactgctcaagaggcctcaggggacagggtgactcgccactgtgccctaccatacagtgc

SEQ ID NO: 12012 - DNA, 201 bp, Homo sapiens
aggggacagtgctctggggccgcccccatccatccctcttgcttctttcctagtcccgcgtcttcacctcggaccccggggcaccggcactttgggccgtyggggcagtggagaaccgaataccgtgacgggtcccttcccgtccctaaccacttctctcactcaccgaagtagtcctccctggcctctggctcccgcatc

SEQ ID NO: 12013 - DNA, 201 bp, Homo sapiens
tggccgagctactggcgaagctagagcgggggctgagggccggggccgtgggctccagccgaaaatcggggggcaacgactgaggtagaggcaaggcccgkgtgggcggcggccccgcgggaaaagagccttcgtagcgcggcgcctcaaaggagccgcgctgatttcgctcagcgtccagggaaccttgctcccgggccg

SEQ ID NO: 12014 - DNA, 201 bp, Homo sapiens
cgtttgccttctggctcccggtgattggcggttagacgatggctggggagcagggtcacggacactattggctgcaaacaacagtcactcaaaaagtcagktaggggaggggcctcctcagggagggacaagactgtgaggctttttcaaggccgtcagacgccatctttagcttgtttttgtttacttgcttttgttctc

SEQ ID NO: 12015 - DNA, 201 bp, Homo sapiens
gtgttgcctccattagtctcactcttacaggcgcagcagcagcatctggcctcgctgccactgggaggggagaagagaatggtggcactgaaggacatggyggatggggcagtaacaaccacgcttacactgctgggccgctccaacaggtaggaagcatcaacttctctggactcactttcctttctcaatgaggatggt

SEQ ID NO: 12016 - DNA, 201 bp, Homo sapiens
tggtgagatcaaagccttagtctcattgctgtattggagcatccccctctacttccctgtccttagcaaagtaccttctaattctttttcctcaaggagamcatacctttcagacccattgaatctcttgtcattggtgatgtggttatgcacattgtggaccagtttctaggaggaaaaaaagaaaacacaatcaagcca

SEQ ID NO: 12017 - DNA, 201 bp, Homo sapiens
tcttacaggcgcagcagcagcatctggcctcgctgccactgggaggggagaagagaatggtggcactgaaggacatggcggatggggcagtaacaaccacrcttacactgctgggccgctccaacaggtaggaagcatcaacttctctggactcactttcctttctcaatgaggatggtcagaggagcccaggccccaagc

SEQ ID NO: 12018 - DNA, 200 bp, Homo sapiens
gaacagaaaggaaaaagagtgaaaagccaggaaaagcacctaggaggaatagccctctgctgccatactcacaggattgagcaggggggccgcctcgctgcagccagcgtgcaccctgggagccgcatgtccctctgagttgctgggaagcccaaaggcccaggccccactgaggctgctcccagctgccgcagctcctc

SEQ ID NO: 12019 - DNA, 201 bp, Homo sapiens
aatctgtgcctaagtgaacccagtccccaagtcagatcttagcattggctcactgttcttctctatcttcctacattcctggctctcaaccctattctcakatgccatgtcctctggcccttcccacttaggaaagggtttagagtttagtatcttgaaagaaaggcctagaaacctacccgatatcggcgacttcgaagt

SEQ ID NO: 12020 - DNA, 201 bp, Homo sapiens
gctgtagattttattcatccttttccaccttgatttcaatgaatgagttcaagtcaggacagcaggttttgtggggttggtcaaaagatggggagccaggkgcattctcatcccctccctcatcttcctcttcttggaaattaggattgtaaagttctggtggaaggagctgggcttcagcagaaggcagtctgtctgagg

SEQ ID NO: 12021 - DNA, 201 bp, Homo sapiens
aagtagccgcgcatgctggcgcgtgcctgtaatcccagctactcaggaggctgagacaggaggatggcttgaacccaggaggcagaggttgcagtgagccragatcacaccattgcacaccagcctgggagacagggcgagactccggctcagaaaaaaagaaggtgagctggtgagtggggtgagatatttttaggctaa

SEQ ID NO: 12022 - DNA, 201 bp, Homo sapiens
tgaacccaggagtcagaggttgcagtgagccgagatcacgccactgcactccagactgggtgatggaacgagactccatctcaaaaaaaaaaaaaaaaaaatgaggttctcctctggctgcaccatttatgagctgtgtgaacattagtaaattatttcacttttctgagaccaagtttcttcatcactatctactttgag

SEQ ID NO: 12023 - DNA, 201 bp, Homo sapiens
aaaggaagaagggagcaagggagagagggaggaagaaaggaggggggatttctgcagtcaagaaaacaaaatactgaaagtggggacacacacgcacacgcacacacacacacacacacacacacacagaaagatgcgggggaggaggctgagatttatagacctgtgagctgctttctgcgctgtgaaatctaattccat

SEQ ID NO: 12024 - DNA, 201 bp, Homo sapiens
gaaaggaagaagggagcaagggagagagggaggaagaaaggaggggggatttctgcagtcaagaaaacaaaatactgaaagtggggacacacacgcacacgcacacacacacacacacacacacacacagaaagatgcgggggaggaggctgagatttatagacctgtgagctgctttctgcgctgtgaaatctaattcca

SEQ ID NO: 12025 - DNA, 201 bp, Homo sapiens
atctccaaacctctataactgagctgaaggtctagtgactctctgcatctctgaagcttgagaccacctcaggacagcttcacttgcttttccacccaagrtgccccttgtcacttactctgcacactagcttaatttgcaggcaatttccagagttaccctttggtgaccaatctgctcaatcccttaaagatcttctca

SEQ ID NO: 12026 - DNA, 201 bp, Homo sapiens
tttccatgaacatacccctgatagcaacgagaaagcaagtatacaccaggagtactgcgagtgaacatttcttttttacttttctttctttttttttttttgagatggagtcttgctctgtcgcccaggctagagtgcagtggcgcgatctcggctcactgcaacctctgcctcccgggttcaagcgattctcccgcctca

SEQ ID NO: 12027 - DNA, 201 bp, Homo sapiens
agcaatttgtgaacacttattgtgcaggaagtaactgttctgaacactttatgtgcatcaatttaggtattattattattattttttttttttattttttwtttttcgagacagagtctttctctgtcgtccaggcaggcggatcacgaggtcaggagttcgagaccagactgaccaacatggtgaaaccccgtctctgct

SEQ ID NO: 12028 - DNA, 201 bp, Homo sapiens
tccctagggaaatgaatgtctccattataatatcccaatattaacttattggccttggacaagtgccacatcccagccacttggttttggttctgggggggtgggtgtgtaaaaagcacgcaaacggctttatgagggagcctcaaatctctctgcttccttcgatgttgcctgtggcagaaatttacattatcccttcag

SEQ ID NO: 12029 - DNA, 201 bp, Homo sapiens
ctttttccttcaggcctttaaaggggttcagggagttgcggtactcacgcctcttagtaaggaagtaggccacacaggctcctggcggggagggaaggaarggagcaagaaggagggtcctctgagtagtggtccccagcccgtttttctgccctaacactattgaatgggaggttggcgatcactacttagatgagggct

SEQ ID NO: 12030 - DNA, 201 bp, Homo sapiens
ctctgagttgctgggaagcccaaaggcccaggccccactgaggctgctcccagctgccgcagctcctcaatcaccacctgcacgccgctgcccacgctgtyacactcctcttccacggcagacagagccttaaaggcttccccgggactttccttgagaggcccaggctcctcaggtggggaactatgtgcccggctttcc

SEQ ID NO: 12031 - DNA, 201 bp, Homo sapiens
ttccgatgggtcagtgtgattcagctacgggaaaggcgatcgcagcgacgcgggaagcagagatcggcgactgctcaagaggcctcaggggacagggtgamtcgccactgtgccctaccatacagtgcgctctgggagtcccgggtaaagggggtcattcccgcgagggatgcggagagcagagcggccggaggagcggct

SEQ ID NO: 12032 - DNA, 201 bp, Homo sapiens
gggggcggagcgcggtgtgtgcgagagcgccgggggtgtccgcgcagggatagctggtgtgcgtgcagcggaaggcgctaactgccctggatgtggagacscgcggactggacgtgagaggcgggcaggggcagttggggcagctgcccctacaacactgaagaattggaataggaaagagtgtgggggtaggggacgggg

SEQ ID NO: 12033 - DNA, 201 bp, Homo sapiens
ctcctcggcctgcagaagggagacaggtgccttctatttgcagatcctgtgctctcctagcacatcacaaatcaaggccttcctgatgaacggtttcagasggtagagagcattccttctgccccccagcatggaacccccgactagtgcaacctaaggaacagggaagggattcagaaggaccttccggcatctggaaag

SEQ ID NO: 12034 - DNA, 201 bp, Homo sapiens
tgggaggggagaagagaatggtggcactgaaggacatggcggatggggcagtaacaaccacgcttacactgctgggccgctccaacaggtaggaagcatcracttctctggactcactttcctttctcaatgaggatggtcagaggagcccaggccccaagctgtagggtctgtgaaagaagagtaaacaagccatgaaga

SEQ ID NO: 12035 - DNA, 201 bp, Homo sapiens
tgatgaacggtttcagacggtagagagcattccttctgccccccagcatggaacccccgactagtgcaacctaaggaacagggaagggattcagaaggacyttccggcatctggaaagattagaagattaaggaagaaaatgtagatctgtctcctcctcctcctcaccatctttactgtaataatggtactgcatttcat

SEQ ID NO: 12036 - DNA, 201 bp, Homo sapiens
ggatgccctgcgccaggaatcccacagcatcccccagcgggaggggctgcgtccccccgcgcatctggggctgagcggggctagcagggtctctggccgcrgctgtccagtccgcaggtctatctgttcacgcgtcgactcgcccgactgccccactctccccggcccccgcccccctagctctcacgctagccacagacc

SEQ ID NO: 12037 - DNA, 201 bp, Homo sapiens
caggcctggcttctgaacataacacctcctcataacaccttagattcctcctcctcgtaacaccttaggtgcaagacctgcataaacagaatgcatgatgstgttctagccctttccttctctcattttcgtttcagactgagagggaaataaacaggcaatttgagataattctatgaatatattgaaggtgagaatagc

SEQ ID NO: 12038 - DNA, 201 bp, Homo sapiens
ccctggatgtggagacccgcggactggacgtgagaggcgggcaggggcagttggggcagctgcccctacaacactgaagaattggaataggaaagagtgtsggggtaggggacggggactctttgtctgcagttggaatgcgcggaggggcatggtggaatgtgtcgcgtcccgggaccggacgacaggaggcatgttctg

SEQ ID NO: 12039 - DNA, 201 bp, Homo sapiens
ttaagcactggtctgacttgaattgttagagaataaaaatacactcagcacaagtaagaaacccagaaagcccaaacagggccacttttgttataaatttrtacaagtaactttattgcagtcagtatttaggagtcaaatactgcttgaaatagagtaggatgctagctgtgtaatagaaatgcattattatacagaagt

SEQ ID NO: 12040 - DNA, 201 bp, Homo sapiens
taccgcgcgcacgcggggagacaccgccccgtttgccttctggctcccggtgattggcggttagacgatggctggggagcagggtcacggacactattggytgcaaacaacagtcactcaaaaagtcaggtaggggaggggcctcctcagggagggacaagactgtgaggctttttcaaggccgtcagacgccatctttag

SEQ ID NO: 12041 - DNA, 201 bp, Homo sapiens
tgtgaacattagtaaattatttcacttttctgagaccaagtttcttcatcactatctactttgagtggtttttgtgaagattatacataatatatgtaagkcacctatagagtgctggcacatggtcagtgctccactagtaacggctggatgatattatggttattcctgtaacattttgtgttcccaacctggacaccc

SEQ ID NO: 12042 - DNA, 201 bp, Homo sapiens
gtgcagtggcacaatctcggctcactgaaacccccgcctcctgggttcaagcaattctcctgcctcagcctccagagtagctgggactacaggaggctgcyaccacacccggttaactttttgtatttttagtagaaacaggtttcaccatgttggccaggctggtcttgaactcctgacctcagatcatctacctgcctc

SEQ ID NO: 12043 - DNA, 201 bp, Homo sapiens
attcagaaggaccttccggcatctggaaagattagaagattaaggaagaaaatgtagatctgtctcctcctcctcctcaccatctttactgtaataatggkactgcatttcattgctttgacattgttccttaaggtgttcagaacacttcacataagttacctcatctactcaacagcactaggaaacatattactccag

SEQ ID NO: 12044 - DNA, 201 bp, Homo sapiens
ccacctcccaggttcaagcaattctcctgccttagcctccagagtcgctgggactacaggcatgtgccaccactcccaggtaatttttgtatttgtagtaragatagggtttcaccatattggccaggctgctcttgaactcctgaccttgtgatccgccctcctcagcctcccaaagtgctgagattacaggcgtgagcc

SEQ ID NO: 12045 - DNA, 201 bp, Homo sapiens
agtctcgctctgtcgcccaggctagagtgtggaggcacgatcttggctcactgcaacctccacctcccaggttcaagcaattctcctgccttagcctccaragtcgctgggactacaggcatgtgccaccactcccaggtaatttttgtatttgtagtagagatagggtttcaccatattggccaggctgctcttgaactc

SEQ ID NO: 12046 - DNA, 201 bp, Homo sapiens
atatatatatatatatatatatatatatatatatatttttttttttttttttttttttttttttgagacagagtctcgctctgtcgcccaggctagagtgkggaggcacgatcttggctcactgcaacctccacctcccaggttcaagcaattctcctgccttagcctccagagtcgctgggactacaggcatgtgccacc

SEQ ID NO: 12047 - DNA, 201 bp, Homo sapiens
gattctcctgcctcagcctcccaagtagctgggatcacagacacgtgccaccacatatggctaatttttatatttttagtagagacagggtttcgcgctgktggccaggctggtcttgaactcctgacctcaggtgatccacccgcctcagcttcccaaagtgttgggattacaggtgtgagccactgcgcccagctcctt

SEQ ID NO: 12048 - DNA, 201 bp, Homo sapiens
gtttgagaccagcctgactaacatggtgaaaccctgtctctactaaaaatacaaaaattaaccgggcgtagtggcgggcatctgtaaccccagctactcgsgaggttgaggcaggagaatcacttgaacccgggaggcaaaggttgcagtgagccgagatggtgccactgcactccagcctggcaacagggcgagactcca

SEQ ID NO: 12049 - DNA, 201 bp, Homo sapiens
ccgggcgcggtggctcatgcctgtaatcccagtactttgggaggccaaggcaggtggtgccatctcagctcactgcatcctccgcctcccgggttcaagcrattctcctgcctcagcctcctgagtagctgggactacaggtgcaccaccaccacatccagctaatttttgtatttttagtagagatggggtttcaccatg

SEQ ID NO: 12050 - DNA, 201 bp, Homo sapiens
ttgtatttcttttctttttttttttctttctgagacagagtttcactctgtcacccaggctggagtgcactcattaaaaagttttgccagccgggcgcggkggctcatgcctgtaatcccagtactttgggaggccaaggcaggtggtgccatctcagctcactgcatcctccgcctcccgggttcaagcgattctcctgc

SEQ ID NO: 12051 - DNA, 201 bp, Homo sapiens
atgtcttttttttttttttgagacagagtttcactcttgttgcccaagctggagtacaatagcacgatctcgactcaccgcaacctctgcctcccgggttsaagcaattctcctgcctcagcctcccaagtagctgggattacaggcatgcaccaccacacccagctaattttgtatttttagtagagacagggtttctcc

SEQ ID NO: 12052 - DNA, 201 bp, Homo sapiens
gcctccccaatagctggtgcatgctactgtgcccaacatgtgtttctttttatatgcttttcatttaaacttctaaaaaataacacaagcctaactgggcrtggtggctcatgcctgtaatctgagcactttggaaggccaaggcaggtggatcatttgaggtcaggagttcgagaccagcttgatcaacatggtgaaacc

SEQ ID NO: 12053 - DNA, 201 bp, Homo sapiens
cttggactcaagggatcctcttgcctcagcctccccaatagctggtgcatgctactgtgcccaacatgtgtttctttttatatgcttttcatttaaacttytaaaaaataacacaagcctaactgggcgtggtggctcatgcctgtaatctgagcactttggaaggccaaggcaggtggatcatttgaggtcaggagttcg

SEQ ID NO: 12054 - DNA, 201 bp, Homo sapiens
atttttgttatttttgtttgtttttggtaaagattgggtttcgccatgttgcccatgctagtctcgaactcctggactgaaataatcctcctgccctggcytcccaaagtgctaggattacagggatgagccacgttacctggctctacaagtactttttcagcagaagctttcataatacttcagggttagctacaaata

SEQ ID NO: 12055 - DNA, 201 bp, Homo sapiens
tcaggtaggggaggggcctcctcagggagggacaagactgtgaggctttttcaaggccgtcagacgccatctttagcttgtttttgtttacttgcttttgytctctgctgctcacaaacctgtgtgtacacgattataagcacagtggccacaaatcggcgtcacacgttgggtggtggccgacttttagttactgctggc

SEQ ID NO: 12056 - DNA, 201 bp, Homo sapiens
gcgtcacacgttgggtggtggccgacttttagttactgctggcctcggttacatttctttcacatgtcacctgcaaattagcagctcctcacagttcaaakaagtttccaatactaggggccccgaggattcccaggcaaaatcaacagagtttagttttgctttgctttggaaggccaagccaacgatatatatgtgcga

SEQ ID NO: 12057 - DNA, 201 bp, Homo sapiens
ttactccaggtccagagaagagacatgtggagaagttatatgtctttttcaaggtcagaggaataacagcagaatccagttattgctactttcaatgtagygttgtatttttttttaactgataccactttttgttgacattaacaatcatgacaatcatgattctaccctctctgtaattttcatacaaatgcattcaga

SEQ ID NO: 12058 - DNA, 201 bp, Homo sapiens
ctgttcacagtggagggagtttctccccttctagataagtttttatcccaccagtgttctgcttccccagtagagactgtgttaagaaaagaggcaaattygctttctcagactgcacagagcatctcattattttgtgaagccccatggccacctatttctgagacatggggcatggcggaagccagagttattcttggc

SEQ ID NO: 12059 - DNA, 201 bp, Homo sapiens
atggaattctctccctctgcataggactgtcactctctggatagaattctcaccatctggatagaactcccactatctggaaagaattctcagtctttagwtagaactctcgctatctttgtggatacagttctcaccctccagagagaactctcactatctatctagatagaattatcactctctggatagaaatctcac

SEQ ID NO: 12060 - DNA, 201 bp, Homo sapiens
tcacaatctggatagaattctcattctctggatagaactctcaatatctatctggatataattgtcgccctctgaatagaactctcactatctcaatacarttctcaccatctagatagaactctcactatctgcatagaattctcactctctgtatataactctcactatctatcgagatagaatactcactctctggat

SEQ ID NO: 12061 - DNA, 201 bp, Homo sapiens
ctgtgcatgatagattagaaacttgcaaactccaaagatgggagggcatggaattcaagagggtggggatcaataaatatcagagtctttattcagactcrgtagggaaacaacctttaaggtcaagaagtcaccagatcttaaaacatgccctggtgttcccacagtggcagggagcctgaaggtgcagggtggcagagg

SEQ ID NO: 12062 - DNA, 201 bp, Homo sapiens
gagagatgggtgtagatacagtcagaacatatatgtacactgtgctgtagttttaaattgtttccacttctattatttctctatttttttctccattatttctcaaaatagatttggttttgcatgtttaaaagacgctctataaatgctccaaattagtcctcacaaagccagcttctgagccaaccgacattgaataat

SEQ ID NO: 12063 - DNA, 201 bp, Homo sapiens
gggaaggtgcgtgtttgggaggtaaatagcaaatactcttcataggttcactagagtcttgctactccaagtacgatccctgggccagcagaatgggcacwgctggagctgattggataggtcccatgagcctcaggccccacccaggctcaatgagtcagagtctgcgtcttaagaagaccccctggtgatctgtgcaca

SEQ ID NO: 12064 - DNA, 201 bp, Homo sapiens
agaattctcactgtgggtagaattctcactatcaatctggacataattcttaccctctgggttgaactctcactatctggatagaattctcaccatgtggrtggaactctcactatctatctggatagtattctcgctctctggaaagaactctcactatctttctggatagaattcttaccctctggatagaactctcac

SEQ ID NO: 12065 - DNA, 201 bp, Homo sapiens
atctctcactatctatctggatagaattctcactctctggatagatctctcactatctgtctggatagaattctcactgtgggtagaattctcactatcawtctggacataattcttaccctctgggttgaactctcactatctggatagaattctcaccatgtggatggaactctcactatctatctggatagtattctc

SEQ ID NO: 12066 - DNA, 201 bp, Homo sapiens
aatgcctgtctagatagaattttcaccatccggatacaactctcactatctggatagaattctcattctctggattgatctctcactatctatctggatakaattctcactctctggatagatctctcactatctgtctggatagaattctcactgtgggtagaattctcactatcaatctggacataattcttaccctct

SEQ ID NO: 12067 - DNA, 201 bp, Homo sapiens
gagtgtggcccactggcatgggcaggcaggacctcagccacctccaagctgtgttcctctgagctcctggggagcgggtttgatttcttgtgattgtgatrtataagacaataatgtttttaaagtttgcatgttaatattagcatacaaatgaaagtaaattaccgagtcttagctgttcctatcctagcaggatttata

SEQ ID NO: 12068 - DNA, 201 bp, Homo sapiens; identical to SEQ ID NO: 4764

SEQ ID NO: 12069 - DNA, 201 bp, Homo sapiens
atagaactctcactatctggatagaattcttacactctggatagaactctcactatcttcctggacggaactctcaccctctggatagaactctcactatytggatagaattctcactatctggataaaagtctcactctctgtttggtacagttctcacgatctggatagaactctcactatctggatagaattcttaca

SEQ ID NO: 12070 - DNA, 201 bp, Homo sapiens
tctggatagaattctcactctgtggatagaactgtcactatctggatagaatactcaccatctcgatagaactctcactgtctatctggatagacttctcrgtctctggatagaagtctcaatgcctgtctagatagaattttcaccatccggatacaactctcactatctggatagaattctcattctctggattgatct

SEQ ID NO: 12071 - DNA, 201 bp, Homo sapiens
aaggttttcaaatttgcattttaagccctccaatttcaagttatgctattggtggggaattttaattaaacagaaaataatcaccaatattggctcaaatrtttcctgatttaaaaaaaaatctgctcttgttcctataaatagtatataagatgtaatcttgccctgggttaaaccagtctacagaggtagatctcgcat

SEQ ID NO: 12072 - DNA, 201 bp, Homo sapiens
tgcttgattcctggaggtggaggctgcagtgagccgtgattgcaccttcactccagcctaggcagcagagcaagaccccatctcaaaaaaaggaaacagcmttgttgggaccagcactaaccttcagtgcgacacagaacacccctattgcttttattctttaagcaaaattaagatatcctcaccggctggaagatcgta

SEQ ID NO: 12073 - DNA, 201 bp, Homo sapiens
ctcactatctgtctggatagaattctcaccatctggatagaactctcagtatctggatagaattcttactctctggatagaactctcactatctttttggwtagaactgtcaccctgtggatagaaatttctctatctatctggatagaattctccctctctggatagaagtctcattatctgtctggatagaattctcac

SEQ ID NO: 12074 - DNA, 201 bp, Homo sapiens
aaagtaagcggggaaggcctcgggttctaaattattggacgtccggctttccatcctcctcatgagcccactgcatgtctgtgtctccagatcctcagtgycatggagctggactcgtaccctctctacgccatctacctcatcgtcattggcctcagcggtggcttcatggtcctgtactacgtgtccttaaggttcatc

SEQ ID NO: 12075 - DNA, 201 bp, Homo sapiens
ttcacagccatcggctacccctgtcctcgctacagcaatcctgctgacttctatggtgagtccccaaggccagcagccagggccctggcacacagggcctycccgatgcttaaaccctgcccaagcttgctggaaagattcaggggagaaactcccagaggtttcaggagaggaggagcaatgatggggaagaacatgggg

SEQ ID NO: 12076 - DNA, 201 bp, Homo sapiens
cggaggcctgtctgatgtcaatgaccatcggcttcctctattttggccatgggagcatccagctctccttcatggatacagccgccctcttgttcatgatyggtgctctcatccctttcaacgtcattctggatgtcatctccaaatgtgagtgtggcccactggcatgggcaggcaggacctcagccacctccaagctgt

SEQ ID NO: 12077 - DNA, 201 bp, Homo sapiens
ttctgatttaatcctcagagccactctatgaggcaggtattaccatccccattttgcataggagaaaaatgaggcttatggagactgtgacattcccaggrtcacggggctggtgtatgctgttgcctcagcatctcttccttttggtttttaagtcgtcagatttccaacgacttccgagacctgcccaccctcctcatc

SEQ ID NO: 12078 - DNA, 201 bp, Homo sapiens
gggacagatgctgtcatcagttttctgatttaatcctcagagccactctatgaggcaggtattaccatccccattttgcataggagaaaaatgaggcttayggagactgtgacattcccagggtcacggggctggtgtatgctgttgcctcagcatctcttccttttggtttttaagtcgtcagatttccaacgacttccg

SEQ ID NO: 12079 - DNA, 201 bp, Homo sapiens
aaggagaaagtgagaggtagagtcatttgaaaaaaacagcatccagcagggcgttggtggcttatgcctgtaatcccagcactctgggaggctgtggtgcrtggatcacttaagttcaggagttcgagaccagcctgggcaacaaggtgaaagcccatctctacaaaaaattataaaaagtagccagttatggtggcgtgg

SEQ ID NO: 12080 - DNA, 201 bp, Homo sapiens
tgcctcccgagtcctacgaagatgcctggggcggtgcagcagtttacgacgctgatccggtaattatctgtcattttattactgaacccgcccccctgccsaagtctttgtatatcacattaagccctttctattaaagtgaatttaaaggagaaagtgagaggtagagtcatttgaaaaaaacagcatccagcagggcgt

SEQ ID NO: 12081 - DNA, 201 bp, Homo sapiens
gtggcgtgggcctacctggtaggctgaggtgggaggattgcttgattcctggaggtggaggctgcagtgagccgtgattgcaccttcactccagcctaggsagcagagcaagaccccatctcaaaaaaaggaaacagcattgttgggaccagcactaaccttcagtgcgacacagaacacccctattgcttttattcttta

SEQ ID NO: 12082 - DNA, 201 bp, Homo sapiens
atggaaagcagagacgaaggatcttgacgaggacacctgtgtggaaaggtaaggtggcaggcgactctgagaggagagctccctgcagaaggtggctgccyccatgacctggccacatcttctgcctcccagcagcgtgaccccactagacaccaactgcctcccgagtcctacgaagatgcctggggcggtgcagcagtt

SEQ ID NO: 12083 - DNA, 201 bp, Homo sapiens
tctgctctgccccttgcttcatggctgagggtggggagaatgtcccagagccccacgaggggtgatcagcattgtgagctgggcgtgcaccaagctcttcrcctgtgagcaggtgccagggaacaggccacctgtgactccacatcccctgcttgcagtggacctgaccagcattgacaggcgcagcagagagcaggaatt

SEQ ID NO: 12084 - DNA, 201 bp, Homo sapiens
tcggggggtgagcgcaggagagtcagcattggggtgcagctcctgtggaacccaggtgagggcctggggggcagatgggggcagagggacctgtgcggtcycctcaggcttggcttggtctggccagagccccaccgactcaccaggctcctctctgtgttggaaaggaatccttattctcgacgaacccacctctgggct

SEQ ID NO: 12085 - DNA, 201 bp, Homo sapiens
tcgcggagctgcggcttaggcagtgcgctgacacccgcgtgggcaacatgtacgtgcgggggttgtcggggggtgagcgcaggagagtcagcattggggtrcagctcctgtggaacccaggtgagggcctggggggcagatgggggcagagggacctgtgcggtcccctcaggcttggcttggtctggccagagccccacc

SEQ ID NO: 12086 - DNA, 201 bp, Homo sapiens
ctgaggtggcctcaaagctccttctggcccacaggtggaggacgtgatcgcggagctgcggcttaggcagtgcgctgacacccgcgtgggcaacatgtacrtgcgggggttgtcggggggtgagcgcaggagagtcagcattggggtgcagctcctgtggaacccaggtgagggcctggggggcagatgggggcagaggga

SEQ ID NO: 12087 - DNA, 201 bp, Homo sapiens
cttcattgcccagatgcggctgcccagaaccttctcccaggcccagcgtgacaaaagggtaactaactggccccagtggtgacccccaggtccaagaagcyacagtgtccatgccccgctcctcccctgctgccttgcctcaggacccagccgcaggtcgagtttgaacaactcagcttgccttccgccagccctgggctg

SEQ ID NO: 12088 - DNA, 201 bp, Homo sapiens
cagatctggatcaatgggcagcccagctcgcctcagctggtgaggaagtgtgtggcccacgtgcgccagcacaaccagctgctccccaacttgactgtgcragagaccttggccttcattgcccagatgcggctgcccagaaccttctcccaggcccagcgtgacaaaagggtaactaactggccccagtggtgaccccca

SEQ ID NO: 12089 - DNA, 201 bp, Homo sapiens; identical to SEQ ID NO: 1273

SEQ ID NO: 12090 - DNA, 201 bp, Homo sapiens
ccagggactatgccacctctctaggggctggtcacatctgcacggacagagtagtccggggtcctggagagtgtatggggagcagtggctgacagcctggmccccacagaagctccgctctcagggatatccctggtggctttgcaggttgtgggagagcctccttgctagatgtgatcactggccgaggtcacggcggca

SEQ ID NO: 12091 - DNA, 201 bp, Homo sapiens
actgtctatctggatagaattcttaatctctggatagaagtctcactatcagtctggatagaattctcaccatctggatagaactttcactatctgtctasatagatctctcactatctatctggatagaattctcactctctggatagaattctcactatctgtctcgatagaatgctcactctgtggatagaactctga

SEQ ID NO: 12092 - DNA, 201 bp, Homo sapiens
gaattctcaacatctggatagagctctcactatctagatagaattctcaccatctgcatggaactctcactatctgtctaggtacaattctcatcatctgsttagagctctcactatctggatagaattctcagtctctgcatagaactgtcactatctatctggatagaattctcaccctctggatagaactcttactat

SEQ ID NO: 12093 - DNA, 201 bp, Homo sapiens
caccctctggatacaactctcactatctggatagaattctcactctctggatagaactcccactatctgtctggatagaattctcaccctctggatagaasgctcactgtctggatagaattctcagcatctgcatggaactctcactatctgtctatgtagaattctcaacatctggatagagctctcactatctagata

SEQ ID NO: 12094 - DNA, 201 bp, Homo sapiens
gaatactcactatctggatagaactctcactgtctatctggacggaattctcactctctggatacaactctcactatctggatagaattgtaactctctgyatataactctcactatctatctagatagaattctcactctgtggatagaactctgactatgtatctggatagaattctcaccctctggatacaactctca

SEQ ID NO: 12095 - DNA, 201 bp, Homo sapiens
atctggatagaattctcaccatctgaatagaactgtcagtatctgaatagaattctcactctctggatagaactctatctatctagatagaattctcaccmtctggatagatctctcaccatctgtctgggtagaattctctccatctgtatagaactctaactatctggatagaattctcaccatctgcatggaactctc

SEQ ID NO: 12096 - DNA, 201 bp, Homo sapiens
tctcactctctctatatatagaattcccacgatctggatagaactttcactatctggatagaattctcactctgtgggtagaactctcactatctattttsatagaattctcaccatatggatagaattctcactatctgtctggatagaattttcactctctggatggaaccctcactacctatctggatataattctca

SEQ ID NO: 12097 - DNA, 201 bp, Homo sapiens
ctatcttgatagaattctcactctttggatagaactctcactatctgtctggatagaattctcagcatctggatagaactctcactatctgggtagtattctcactctcttggtagaactctcactatctatctggatagaattctcacaatctggatagaagtcttactgtgtatctggatagaattttcactctctgga

SEQ ID NO: 12098 - DNA, 201 bp, Homo sapiens
aactcttactacctggaaagaactctcagtatctggctagatttctcaccatctgggtagaattctcactatctatcttgatagaattctcactctttggrtagaactctcactatctgtctggatagaattctcagcatctggatagaactctcactatctgggtagtattctcactctcttggtagaactctcactatc

SEQ ID NO: 12099 - DNA, 201 bp, Homo sapiens
actccccagatagtggacactatgtctcactatccggatagtggacataattctcactatccggatagaaatttcaccatctgcatagaactctcactacygggatagaattctcactctctgggtagaactctcactatctatctggatagaattctcaccatctgcattgaaatctcactatctatctggatagaatta

SEQ ID NO: 12100 - DNA, 201 bp, Homo sapiens
ataaaactctcactatccgtctggatagaattctcaccatctagttagaactttcactatctggatagaattctcactctctggatagaactctcactatstatctggatagaattctcattctctggatagatctctcattatctgtctggagagaatactcattctctggatagaactctcactatcaatgtggataga

SEQ ID NO: 12101 - DNA, 201 bp, Homo sapiens
gaattctcactctgtggatagaactgtcgctatcaatctggatagaattctcaccctctggatagaactctcactatctagaaggatttctcaccatccakatagaactctcactatctggatagaattctcactatctggatagaactctcactatctatcttgatagaattctcaccctctggatagcactctcactat

SEQ ID NO: 12102 - DNA, 201 bp, Homo sapiens
actatctgtctagatagaattttcaccatctggatagcgctcttactatctggatagaattctcactctgcatagaactctcactatctatctggatagarctcttactatctggatagaattctcactctgcatagaactctcactatctatctggatagaattctcactctctggatagatctctcactatttgtctgg

SEQ ID NO: 12103 - DNA, 201 bp, Homo sapiens
tatctggatagaattcttaccatctggatagaactctcactatctggagagaattctcactctctgtgtggaactctcactatttatctggatagaattcycaacatctagatagaactctcactatttgtctggatagagttctcaccatatggacagaactctcactatctggttagaattctcactctctggatagaa

SEQ ID NO: 12104 - DNA, 201 bp, Homo sapiens
atcagattgggtctacagccaagtgtgctgtctccctcctggggcagagcagccgaccaaggggtcagtgagaaatctacctgaagttggccggtccctasaaccctccagccagacattctcctgctttcggcagggtgcctgggaggccaagttattaattttcagtgagaattctcaccatctggatagaactctcac

SEQ ID NO: 12105 - DNA, 201 bp, Homo sapiens
tgaacctgagaggcggaggttgcagtgagctgagattgtgccactgcaccccagtctgggcgatagagtgagactccatctcaaaaaaaaaaaaaaaaaaaggatatgggaggagggaaggggaagagagaggagtggggaacctctagccaagccaaggttctggggaaggaatgaagggagggtgggcaggcatgcatg

SEQ ID NO: 12106 - DNA, 201 bp, Homo sapiens
cctggccaacatggtgaaactctgtctctaataaaaatatatgaattagctgggtgcgtgacgcttgcctatagtaccagctacttgggaggctgaggcaygagaattgcttgaacctgagaggcggaggttgcagtgagctgagattgtgccactgcaccccagtctgggcgatagagtgagactccatctcaaaaaaaa

SEQ ID NO: 12107 - DNA, 201 bp, Homo sapiens
agtgtcccaagttctccaccatccttcccccaggaggacaggccgcccctcgccctctgtactcacattctgcatgaactcacagaaaggtcacctccctmcctgtgctcaggtggcagcctggcttcctgacggtgtgtcatcctcaggccagccatccccagaataggggccaaaaggcacctgccgacctggccatcg

SEQ ID NO: 12108 - DNA, 201 bp, Homo sapiens
tgcccagccctggctgtgactcctcgtccagcagcccacaccctcctcctagtgtcccaagttctccaccatccttcccccaggaggacaggccgcccctygccctctgtactcacattctgcatgaactcacagaaaggtcacctccctccctgtgctcaggtggcagcctggcttcctgacggtgtgtcatcctcaggc

SEQ ID NO: 12109 - DNA, 201 bp, Homo sapiens
tgttgtacagattatttaatcacccaggtagtaagctttgtacccaagtgttttttcctgctctccctcctcccatcctccaccctcagttaggtgaatcyttttttaaaaaagagtattaaaaataccactgatgcactttgggaggcccaggcgggtagatcacctgaggtcaggagttcaagaccagcctcgccaaca

SEQ ID NO: 12110 - DNA, 201 bp, Homo sapiens
agcaaacaagcagaaaacactccatctgcgggagtggaaagagctcattcctagctccacggtaggaagatgttctgagcctgagcccaatccgcattcayagcttgaacagctgtcacagacagaggctcaccgaaagtttttggaaactggatccaatctgatgcttactttctcaaatcaataataattagtacatca

SEQ ID NO: 12111 - DNA, 201 bp, Homo sapiens
ggtcaggggttcgagaccagcctggccaacatggtgaaaccccgtcgctgctaaaaatacaaaaattagctgggtgtggtggcgggtgtggtggcaggcayggtggcaggtgcctgtaatcccagctactcaggaggctgaggcaggggaatctcttgaacctggatggtagaggctgcagtgctccagcctgggccacag

SEQ ID NO: 12112 - DNA, 201 bp, Homo sapiens
ttttcagaggaaggtgttcaaactccctactcctcagtgtgtctagagtatcctcctgcacgcgcgcgcacacacacacacacacacacacacacacacamtcccctccatttgacagatgaggagactcaaatccaaagaaattgagggattctcgtaaggacacatatttaatgcagagctagaactagaactttggtt

SEQ ID NO: 12113 - DNA, 201 bp, Homo sapiens
ccacctttctttctccctaccagtttggaagcattttcagaggaaggtgttcaaactccctactcctcagtgtgtctagagtatcctcctgcacgcgcgckcacacacacacacacacacacacacacacacactcccctccatttgacagatgaggagactcaaatccaaagaaattgagggattctcgtaaggacacat

SEQ ID NO: 12114 - DNA, 201 bp, Homo sapiens
gccatgaggggcattggttcaggttgttcctccacaatcacattctgattatggccagacagcccctgccacactctcacctctcagacagcctctccagygtcttacttagcacaactttcactcatctgcaaagagccaggttcttggagtgcctcaaattgtcatttccatggccaaatttaaaatgagagaatgtct

SEQ ID NO: 12115 - DNA, 201 bp, Homo sapiens
aagccaatgagcctttctctgctctgccacttaccagctgtgtgaccttgagcaagttgcttaactgccctgagcctcatctgtaaaacaaggattctgakcatatctatgttatagatttgcagtgaggattgaataaggtgatggatgttaagtgattaacacaatgtcttgcacatagtaaacatctgataaattatt

SEQ ID NO: 12116 - DNA, 201 bp, Homo sapiens
gaaatgaacaatgtacaatgctattaactacagactttattcagatttcattagttatatatatatgtgtgtgtgtgtgtgttatatatatatatatatawaattttttttttgtaaaatgtactatccctggagcttataaaacatccagagtgcaaagacaatgactgacctttcagaggcacccaggaaccccctggt

SEQ ID NO: 12117 - DNA, 201 bp, Homo sapiens
tataattatgaacactaagaaatgaacaatgtacaatgctattaactacagactttattcagatttcattagttatatatatatgtgtgtgtgtgtgtgttatatatatatatatatataattttttttttgtaaaatgtactatccctggagcttataaaacatccagagtgcaaagacaatgactgacctttcagaggc

SEQ ID NO: 12118 - DNA, 201 bp, Homo sapiens; identical to SEQ ID NO: 4783

SEQ ID NO: 12119 - DNA, 201 bp, Homo sapiens; identical to SEQ ID NO: 4784

SEQ ID NO: 12120 - DNA, 201 bp, Homo sapiens; identical to SEQ ID NO: 4785

SEQ ID NO: 12121 - DNA, 201 bp, Homo sapiens; identical to SEQ ID NO: 4786

SEQ ID NO: 12122 - DNA, 201 bp, Homo sapiens; identical to SEQ ID NO: 4787

SEQ ID NO: 12123 - DNA, 201 bp, Homo sapiens; identical to SEQ ID NO: 4788

SEQ ID NO: 12124 - DNA, 201 bp, Homo sapiens; identical to SEQ ID NO: 4789

SEQ ID NO: 12125 - DNA, 201 bp, Homo sapiens; identical to SEQ ID NO: 4790

SEQ ID NO: 12126 - DNA, 201 bp, Homo sapiens; identical to SEQ ID NO: 4791

SEQ ID NO: 12127 - DNA, 201 bp, Homo sapiens
tgggaggcggaagttgcagtgagccaaaatcgcgctactgcactccagcctgggcaacagagcaagactcgatctccaaacaaacaaacaaaacaaaacaacaacaagaaaaacagaacgtggtggctcatgcctgtaatcccagcactttgggaggccaaggtgggtgaatcaccttaggtcaggagttcaagaccagcc

SEQ ID NO: 12128 - DNA, 201 bp, Homo sapiens
agaagccaaggttttggtgataagtatgctcattgcttgtggaacatctctgctcccaggctctctcagtgaacagagttagggagtgtgtgtgtgtgtgygcgcgcgcgcgcgcatgtgcatacatatacacctaagtacacatgagtttactctgataacatccatttccaatccagcatcacagagttgatcctaggt

SEQ ID NO: 12129 - DNA, 201 bp, Homo sapiens
ttagaagccaaggttttggtgataagtatgctcattgcttgtggaacatctctgctcccaggctctctcagtgaacagagttagggagtgtgtgtgtgtgygcgcgcgcgcgcgcgcatgtgcatacatatacacctaagtacacatgagtttactctgataacatccatttccaatccagcatcacagagttgatcctag

SEQ ID NO: 12130 - DNA, 201 bp, Homo sapiens
atctcggctcactgcaacctctgcctcccaggttcaagcgattgccttgcctcagcctcccaagtagttgggattaacagtgcccaccaccacacctggctaatttttgtatttttagtaaagacagtgtttcaccatattggccagactggttgtgaactctaggcctcaagtgatctgcctgcttcggcctcccaaagt

SEQ ID NO: 12131 - DNA, 201 bp, Homo sapiens
gatctcggctcactgcaacctctgcctcccaggttcaagcgattgccttgcctcagcctcccaagtagttgggattaacagtgcccaccaccacacctggctaatttttgtatttttagtaaagacagtgtttcaccatattggccagactggttgtgaactctaggcctcaagtgatctgcctgcttcggcctcccaaag

SEQ ID NO: 12132 - DNA, 201 bp, Homo sapiens
cgatctcggctcactgcaacctctgcctcccaggttcaagcgattgccttgcctcagcctcccaagtagttgggattaacagtgcccaccaccacacctggctaatttttgtatttttagtaaagacagtgtttcaccatattggccagactggttgtgaactctaggcctcaagtgatctgcctgcttcggcctcccaaa

SEQ ID NO: 12133 - DNA, 201 bp, Homo sapiens
gcgatctcggctcactgcaacctctgcctcccaggttcaagcgattgccttgcctcagcctcccaagtagttgggattaacagtgcccaccaccacacctggctaatttttgtatttttagtaaagacagtgtttcaccatattggccagactggttgtgaactctaggcctcaagtgatctgcctgcttcggcctcccaa

SEQ ID NO: 12134 - DNA, 201 bp, Homo sapiens
gtgggaaccccgtcgagctggcttctgcatccttttgatatgtcctcatcatcctttgagggctgaaacaaccaagagtttcaggctcattttttgttttktttttttttttttgagacagaatctcattctgtggcccaggctggagtgcaatggcgcgatctcggctcactgcaacctctgcctcccaggttcaagcga

SEQ ID NO: 12135 - DNA, 201 bp, Homo sapiens
ggccagtgggaaccccgtcgagctggcttctgcatccttttgatatgtcctcatcatcctttgagggctgaaacaaccaagagtttcaggctcattttttkttttttttttttttttttgagacagaatctcattctgtggcccaggctggagtgcaatggcgcgatctcggctcactgcaacctctgcctcccaggttca

SEQ ID NO: 12136 - DNA, 201 bp, Homo sapiens
ccaagtgtcaagggcgggaccagatggagataattgaatcataggggtggtttctctgatgctgttctcctgagagtgagtgagttctgatgagatccgayggttttataaggggcttccctcttcgctcggctctcattctctctcccgctaccctgtgaagaggagccttccaccacgactgcaagtttcctgaggctg

SEQ ID NO: 12137 - DNA, 201 bp, Homo sapiens
aggctggcccttctggaagcagaggcctttgcccactgccctggaggccaaaggaatgattccattagagattccagatgcacctcctcctatcccacagstgatatccagaagtcgcccttgactgtctccctccctctccacatccacctgtgagccaggtcgattctgcctcctgtttctctgaaatgtctgcttggc

SEQ ID NO: 12138 - DNA, 201 bp, Homo sapiens
tcctgctggtgtggctggtggtcttctgttgcaggattatggccctggccgccgcggccctgctccccaccttccacatggcctccttcttcagcaatgcyctctacaactccttctacctcgccgggggcttcatgataaacttgagcagcctgtggacaggtaaggcctgcccccggggcctgggccagctttgttagg

SEQ ID NO: 12139 - DNA, 201 bp, Homo sapiens
tttgacagcagaacacgagctacagacttgcaaaacctgaagagcctcatcaaacatctaaattaggatggctttactgtgcctatttaaaaaaaaaaatkagagacttgggcaatatgataactactttgaattgtattaagagagtctccaaaacagaagcactgtagatttattctacttcttcattctcttttcctt

SEQ ID NO: 12140 - DNA, 201 bp, Homo sapiens
actgtctggatggaactctcactacctgtctcgatagaattctcaccctctggatagaactctcacaatctggatagaattctcactgtctggatataatyctcactctctggatagaactagcactatctgggtagaattctcacaatctggatagaattctcactatctggatagaattctaactctggatagaactct

SEQ ID NO: 12141 - DNA, 201 bp, Homo sapiens
aattctcactgtctggatggaactctcactacctgtctcgatagaattctcaccctctggatagaactctcacaatctggatagaattctcactgtctggrtataatcctcactctctggatagaactagcactatctgggtagaattctcacaatctggatagaattctcactatctggatagaattctaactctggata

SEQ ID NO: 12142 - DNA, 201 bp, Homo sapiens
tccccatggaggggcactgagtcctcattaaagcttcctggacagctggagttggagccagagcatgactgtcatgtggcccttggctctgaaggctcttrctctgtcctaagatgtcctcaaaatgagcctgggtagtgggacttgggcggggcctctactctttcccattttttgatccactgctcttaccctgaggct

SEQ ID NO: 12143 - DNA, 201 bp, Homo sapiens
agcatgactgtcatgtggcccttggctctgaaggctcttgctctgtcctaagatgtcctcaaaatgagcctgggtagtgggacttgggcggggcctctacyctttcccattttttgatccactgctcttaccctgaggcttctgcagatgtggtcaggcctggcagggtgaaggaccagcccttggggtccctctgcctct

SEQ ID NO: 12144 - DNA, 201 bp, Homo sapiens
acaggcgcagcagagagcaggaattggccaccagggagaaggctcagtcactcgcagccctgtttctagaaaaagtgcgtgacttagatgactttctatgraaagcagagacgaaggatcttgacgaggacacctgtgtggaaaggtaaggtggcaggcgactctgagaggagagctccctgcagaaggtggctgccccca

SEQ ID NO: 12145 - DNA, 201 bp, Homo sapiens
cagctcgcctcagctggtgaggaagtgtgtggcccacgtgcgccagcacaaccagctgctccccaacttgactgtgcgagagaccttggccttcattgccyagatgcggctgcccagaaccttctcccaggcccagcgtgacaaaagggtaactaactggccccagtggtgacccccaggtccaagaagctacagtgtcca

SEQ ID NO: 12146 - DNA, 201 bp, Homo sapiens; identical to SEQ ID NO: 1259

SEQ ID NO: 12147 - DNA, 201 bp, Homo sapiens
tggaaaggaatccttattctcgacgaacccacctctgggctcgacagcttcacagcccacaacctggtgaagaccttgtccaggctggccaaaggcaaccrgctggtgctcatctccctccaccagcctcgctctgacatcttcaggctgtttgatctggtcctcctgatgacgtctggcacccccatctacttaggggcg

SEQ ID NO: 12148 - DNA, 201 bp, Homo sapiens
tggctgacagcctggcccccacagaagctccgctctcagggatatccctggtggctttgcaggttgtgggagagcctccttgctagatgtgatcactggcygaggtcacggcggcaagatcaagtcaggccagatctggatcaatgggcagcccagctcgcctcagctggtgaggaagtgtgtggcccacgtgcgccagca

SEQ ID NO: 12149 - DNA, 201 bp, Homo sapiens; identical to SEQ ID NO: 1262

SEQ ID NO: 12150 - DNA, 201 bp, Homo sapiens
tgtgtctccagatcctcagtgccatggagctggactcgtaccctctctacgccatctacctcatcgtcattggcctcagcggtggcttcatggtcctgtastacgtgtccttaaggttcatcaaacagaaaccaagtcaagactggtgattcacgccagacgtctgcccgctggtgggggacctgagcagacccttcaact

SEQ ID NO: 12151 - DNA, 201 bp, Homo sapiens
ccagatctggatcaatgggcagcccagctcgcctcagctggtgaggaagtgtgtggcccacgtgcgccagcacaaccagctgctccccaacttgactgtgygagagaccttggccttcattgcccagatgcggctgcccagaaccttctcccaggcccagcgtgacaaaagggtaactaactggccccagtggtgaccccc

SEQ ID NO: 12152 - DNA, 201 bp, Homo sapiens
gtcttctgttgcaggattatggccctggccgccgcggccctgctccccaccttccacatggcctccttcttcagcaatgccctctacaactccttctaccycgccgggggcttcatgataaacttgagcagcctgtggacaggtaaggcctgcccccggggcctgggccagctttgttaggactcatgtgactggatgaag

SEQ ID NO: 12153 - DNA, 201 bp, Homo sapiens
ctttatccttggggtcacaatgtgtccagccctgaaggaggcccctgaggtggcctcaaagctccttctggcccacaggtggaggacgtgatcgcggagcwgcggcttaggcagtgcgctgacacccgcgtgggcaacatgtacgtgcgggggttgtcggggggtgagcgcaggagagtcagcattggggtgcagctcctg

SEQ ID NO: 12154 - DNA, 201 bp, Homo sapiens
gtgcgccagcacaaccagctgctccccaacttgactgtgcgagagaccttggccttcattgcccagatgcggctgcccagaaccttctcccaggcccagcrtgacaaaagggtaactaactggccccagtggtgacccccaggtccaagaagctacagtgtccatgccccgctcctcccctgctgccttgcctcaggaccc

SEQ ID NO: 12155 - DNA, 201 bp, Homo sapiens
taggcagtgcgctgacacccgcgtgggcaacatgtacgtgcgggggttgtcggggggtgagcgcaggagagtcagcattggggtgcagctcctgtggaacmcaggtgagggcctggggggcagatgggggcagagggacctgtgcggtcccctcaggcttggcttggtctggccagagccccaccgactcaccaggctcct

SEQ ID NO: 12156 - DNA, 201 bp, Homo sapiens
ataggagaaaaatgaggcttatggagactgtgacattcccagggtcacggggctggtgtatgctgttgcctcagcatctcttccttttggtttttaagtcrtcagatttccaacgacttccgagacctgcccaccctcctcatccatggggcggaggcctgtctgatgtcaatgaccatcggcttcctctattttggccat

SEQ ID NO: 12157 - DNA, 201 bp, Homo sapiens
atctgggggcactgctacttttaaacgtttataataatggcagtgaaggtgctggcttcatatccttgcaagggctgttctttgcagatcctcggggagcytccggagcactgtgcctacatcatcatctacgggatgcccacctactggctggccaacctgaggccaggcctccagcccttcctgctgcacttcctgctg

SEQ ID NO: 12158 - DNA, 201 bp, Homo sapiens
atatcttttaattaatcatttccagaggtagagattactcaattttttaaacattctgctccaaacttttacacccgtctggtagataagttctgtttacygtataaccaaagatcaaatgaaatcttatgtataaatgcactttgtaactgaaacagcatcacagtcatgaagtccctctcactctgtccctgtccctgc

SEQ ID NO: 12159 - DNA, 201 bp, Homo sapiens
tctggatagaattctcactgtctggatagaattctcaccaaatgtctggatagaattctcactctgtggatagaactctgactgtctatctggatagaatwctctccctctggatacaactctcactatctggatagaattctcacactctggatacaactctcactctctgtctggatataattctcaccctctggatag

SEQ ID NO: 12160 - DNA, 201 bp, Homo sapiens
aatctgggtggaactctcactatctatctggatagaattctcaccatctggatagaactctcactatctgtctggatagaactgtcactctcagaactttstggatagaattctcactgtctggatagaattctcaccaaatgtctggatagaattctcactctgtggatagaactctgactgtctatctggatagaattc

SEQ ID NO: 12161 - DNA, 201 bp, Homo sapiens
gaactctcactatctatctggatagaattctcactctctggatataactctcactatctggatagaattttcactctctggatataactctcactacctayctggatataattctcactctctggatagcactcactatctggatagaattctcaccatcgggatagaattctcactatatacctagatagaattctcaca

SEQ ID NO: 12162 - DNA, 201 bp, Homo sapiens
agaactctcactatctatctggatagaattctcaccatctggatagaactctcacgatctgggtagaattctaagtctcttggtagaactctcactatctmtctgtgtagaattctgataatctggttagcactcttactaactgtctggatagaattctcactctctggatagaactctcactctctgtctaggtagaat

SEQ ID NO: 12163 - DNA, 201 bp, Homo sapiens; identical to SEQ ID NO: 4825

SEQ ID NO: 12164 - DNA, 201 bp, Homo sapiens; identical to SEQ ID NO: 4826

SEQ ID NO: 12165 - DNA, 201 bp, Homo sapiens; identical to SEQ ID NO: 4827

SEQ ID NO: 12166 - DNA, 201 bp, Homo sapiens; identical to SEQ ID NO: 4828

SEQ ID NO: 12167 - DNA, 201 bp, Homo sapiens
tatgctcaaggacatgagaaaaagtgtgcagagtacacacattgcagacttgagaaagaaattgtcctcagaacaatttgcaatacaaagcttgcttaatratttactggaactggtaaactcagcgattatgccaggcactggatcttcaattaagtgtaagaaaataggcttacagtgtaagatgtctggaaactggga

SEQ ID NO: 12168 - DNA, 201 bp, Homo sapiens
tgggcaatatgataactactttgaattgtattaagagagtctccaaaacagaagcactgtagatttattctacttcttcattctcttttcctttcccttaytttttaggttactcagagagggcaatgctttactatgaactggaagacgggctgtacaccactggtccatatttctttgccaaggtgactgggcagggtt

SEQ ID NO: 12169 - DNA, 201 bp, Homo sapiens
cgagtcttagctgttcctatcctagcaggatttatatttgacagcagaacacgagctacagacttgcaaaacctgaagagcctcatcaaacatctaaattrggatggctttactgtgcctatttaaaaaaaaaaatgagagacttgggcaatatgataactactttgaattgtattaagagagtctccaaaacagaagcac

SEQ ID NO: 12170 - DNA, 201 bp, Homo sapiens
catacaaatgaaagtaaattaccgagtcttagctgttcctatcctagcaggatttatatttgacagcagaacacgagctacagacttgcaaaacctgaagrgcctcatcaaacatctaaattaggatggctttactgtgcctatttaaaaaaaaaaatgagagacttgggcaatatgataactactttgaattgtattaag

SEQ ID NO: 12171 - DNA, 201 bp, Homo sapiens
ggtcattgagaaaaatggagacaataggagagaatctctggttaaaagggaagtcgtggtcataccagccctcaaagaaagccagacggcactgtgtggcrtgtgtctttcctgatgtttccatgcatacacacatttgtaaacgtagcgggatcatactctgcatgctggtctgtagctggtttcttttcagttagggca

SEQ ID NO: 12172 - DNA, 201 bp, Homo sapiens
acaatgtatctggatagaattgtcaccctctggatagaactctcactatctgggtagaattctcactctagatagaactctcacaatctttcagatagaawtctcctcctctggatagagctctcacagtctggatagaattctcactctgtggatagaactgtcactatctggatagaatactcaccatctcgatagaac

SEQ ID NO: 12173 - DNA, 201 bp, Homo sapiens
cccactatcgatcaggatagaattctcactctgtggatagaactctgacaatgtatctggatagaattgtcaccctctggatagaactctcactatctggrtagaattctcactctagatagaactctcacaatctttcagatagaattctcctcctctggatagagctctcacagtctggatagaattctcactctgtgg

SEQ ID NO: 12174 - DNA, 201 bp, Homo sapiens
gaattctcaatctctgcatagaactctcactgtctggatagaattctcagtctctgtatagaactctcactatctgtctggatagaattctcactctgtgratagaactctccgtatcaatctggatagaattctcaccctctggatagaactgtcactatctggaaggaattctcaccatctggatagaactgtcactat

SEQ ID NO: 12175 - DNA, 201 bp, Homo sapiens
agaactctgaccatctggatagaactctcactatctatctggatagaattctcattctctggatagaactctcactatctggatagaatcctcactctatwtagaactctcactatctctctggatagaattctcactctggaaagaaccctcactatctatatggaaagaattctcaacatctggatagaatcctcacta

SEQ ID NO: 12176 - DNA, 201 bp, Homo sapiens; identical to SEQ ID NO: 4838

SEQ ID NO: 12177 - DNA, 201 bp, Homo sapiens
cacctttctttctccctaccagtttggaagcattttcagaggaaggtgttcaaactccctactcctcagtgtgtctagagtatcctcctgcacgcgcgcgyacacacacacacacacacacacacacacacactcccctccatttgacagatgaggagactcaaatccaaagaaattgagggattctcgtaaggacacata

SEQ ID NO: 12178 - DNA, 201 bp, Homo sapiens; identical to SEQ ID NO: 4839

SEQ ID NO: 12179 - DNA, 201 bp, Homo sapiens
taaataagaaaaaagtagatcccggccaggcacagtggctcatacctgtaatcctagcactttgggaggccgaggcgggcagatcacgaggtcaggagatsgagaccgtcctggctatcacggtgaaaccccgtctctactaaaaatacaaaaaattagctgggtgtcgtggtgggtgcctgtagtcccagctacttggga

SEQ ID NO: 12180 - DNA, 201 bp, Homo sapiens
ttcactcatctgcaaagagccaggttcttggagtgcctcaaattgtcatttccatggccaaatttaaaatgagagaatgtctgagctgaaagggggcttgrggaacagaggtcattctcatcatgttccacctttctttctccctaccagtttggaagcattttcagaggaaggtgttcaaactccctactcctcagtgtg

SEQ ID NO: 12181 - DNA, 201 bp, Homo sapiens
actgttaataactggatagaattttcaccatctggatagaactctcactatctggatagaactctcaccatgtgtataaaactctcactgtgtgggaagaraactctcactttctggatagaaatctcactttctatctggatagaactctccccatgtagatagaactctccctatctggatacaattttcccatctgaa

SEQ ID NO: 12182 - DNA, 201 bp, Homo sapiens
gctcatttttttttgtattttttgtagagatatggttttgccatggtggccaggctgatctccaactcctggcctcaggtgatctgcttgccttggcctcycaaagtgctgggattacaggcatgagtcactgcaccgagcatctcctggttgtttatagattcagtgttgtttggcttcaggtttacttgcctgtgtaaa

SEQ ID NO: 12183 - DNA, 201 bp, Homo sapiens; identical to SEQ ID NO: 4841

SEQ ID NO: 12184 - DNA, 201 bp, Homo sapiens; identical to SEQ ID NO: 4843

SEQ ID NO: 12185 - DNA, 201 bp, Homo sapiens
tagaattctcactctctggatagaactctcactatctgtctaggtagaattctcactctctggatagaactctatttgtctaggtagaattttcaccgtcyggaaacatctctcacaatctggataggattctcactctgtaggtagaactcttactgtcaatctggatataattctcactctctgggtagaactctcact

SEQ ID NO: 12186 - DNA, 201 bp, Homo sapiens; identical to SEQ ID NO: 4845

SEQ ID NO: 12187 - DNA, 201 bp, Homo sapiens; identical to SEQ ID NO: 4846

SEQ ID NO: 12188 - DNA, 201 bp, Homo sapiens
gggtcatgtgaagtcaccgatgccaccagatgccacattttctaggggagtttcagagacttgaacttttattttaaacatttaccaaaacaccaggactrtggaccaggaatgatagttttctggccagaaggaatctaaaaaaaagaagtcctcattgtattttaccttttcagagcctcactgtggccccccagcagg

SEQ ID NO: 12189 - DNA, 201 bp, Homo sapiens
gaactctcagtgtctttctggatagaattctcaccctctggatagaactcgcactatctacctggatagaagtctcactctctggatataactctcactawctgtctggatagaattctcactatctgcatagaattctatctgtctggttagaattttcactctctagatagaactctcactatctatctggatagaatt

SEQ ID NO: 12190 - DNA, 201 bp, Homo sapiens; identical to SEQ ID NO: 4850

SEQ ID NO: 12191 - DNA, 201 bp, Homo sapiens
ctcttgtcatgatcccaaattaaacaactagcaacagaaatgttcaaatctgtcaaatccaagtgttaacagacctgggaccaggggttcctcatagtggmttagcacagcatacagaccactttcctttggcccaaccggccttggggtctggagcaccaaacaggccctgaggaagcgtgcaaggaactggaatgcggg

SEQ ID NO: 12192 - DNA, 201 bp, Homo sapiens
cactgcatgtctgtgtctccagatcctcagtgccatggagctggactcgtaccctctctacgccatctacctcatcgtcattggcctcagcggtggcttcrtggtcctgtactacgtgtccttaaggttcatcaaacagaaaccaagtcaagactggtgattcacgccagacgtctgcccgctggtgggggacctgagcag

SEQ ID NO: 12193 - DNA, 201 bp, Homo sapiens; identical to SEQ ID NO: 4855

SEQ ID NO: 12194 - DNA, 201 bp, Homo sapiens
ttagattttggaaaaaattgcaaaaataacacagtgtttccatatacccattgtccagcttcccctaatgttaacatcttgcatacccatagtataattakgaacactaagaaatgaacaatgtacaatgctattaactacagactttattcagatttcattagttatatatatatgtgtgtgtgtgtgtgttatatatat

SEQ ID NO: 12195 - DNA, 201 bp, Homo sapiens
tgtgtggcgtgtgtctttcctgatgtttccatgcatacacacatttgtaaacgtagcgggatcatactctgcatgctggtctgtagctggtttcttttcasttagggcagcacctctacctcccgtctgattgggtcttcctcggcattccagttagtctagccataatcacccacccattaagtccatcttgatggccag

SEQ ID NO: 12196 - DNA, 201 bp, Homo sapiens
tcttgatggccagattatcttcaggcttttgctactacaagcaatgaggcagcagacatcattgagcgtacatttttttttttttttttaacacagagtcyctctctgtcacccaggctggagtgcactagggcaatcttggctcactgcaacctccgcctcccaggttcaagtgattctcctgcctcagcctcccaagta

SEQ ID NO: 12197 - DNA, 201 bp, Homo sapiens
atagaattctcagtctctgcatagcactctcactatctgtctggatagaattctcactctatggatagaactctgactatctatctggatagaattctcamcctctagatagaactctcactatctggatagaattctcaccctctagatagaactctcactatctggatagaattctccctactgatagaactctcactc

SEQ ID NO: 12198 - DNA, 201 bp, Homo sapiens
ttctatggatagaactctcagtatcaatgtggatagaattctcaccctctggatggaactgtcactatctatctcaatagaattctcaccctctggatagmcctctcactagctatctggatagaattctcactctctggataaaactctcactgtctgtctggatagaattctcaccatctggataaaactctcactatc

SEQ ID NO: 12199 - DNA, 201 bp, Homo sapiens; identical to SEQ ID NO: 4860

SEQ ID NO: 12200 - DNA, 201 bp, Homo sapiens
aattctcaccatctggatcaaactctcactatctggatagaattctcaccctctggatagaactgtcactatctatctggatagaactctccccatctggrttgaactctcactatctggatagaattctcaccctctggatagaactctcactttctggatagaattctcaccctctggatagaactctcactatctgga

SEQ ID NO: 12201 - DNA, 201 bp, Homo sapiens; identical to SEQ ID NO: 4862

SEQ ID NO: 12202 - DNA, 201 bp, Homo sapiens
acagtggctcatacctgtaatcctagcactttgggaggccgaggcgggcagatcacgaggtcaggagatcgagaccgtcctggctatcacggtgaaacccygtctctactaaaaatacaaaaaattagctgggtgtcgtggtgggtgcctgtagtcccagctacttgggaggttgaggcaggagaatggcgtgaacctggg

SEQ ID NO: 12203 - DNA, 201 bp, Homo sapiens
ctctctgaggatagatctcaacagccaaccattgtccaaacaactgtgcaagggcaggaagactgaagctggttgaacacttttgctttacctggacctgrttttttttttcctccatgcagaaaagaaaaagataagtgcctatttttgatttgctaatgcagcttttctttatttgtactaaggctgcataatgtaggc

SEQ ID NO: 12204 - DNA, 201 bp, Homo sapiens
ggatagaactctcactatctatctggatagaattcttactctagatagaactctcactatctgtctggatagaattctcaccatctggatcaaactctcastatctggatagaattctcaccctctggatagaactgtcactatctatctggatagaactctccccatctgggttgaactctcactatctggatagaattc

SEQ ID NO: 12205 - DNA, 201 bp, Homo sapiens
ctggatagatctctcactgtctgcctggatcgaattctcattctatggatagaactctcagtatcaatgtggatagaattctcaccctctggatggaactstcactatctatctcaatagaattctcaccctctggatagacctctcactagctatctggatagaattctcactctctggataaaactctcactgtctgtc

SEQ ID NO: 12206 - DNA, 201 bp, Homo sapiens
tgggaggccaaggtgggtgaatcaccttaggtcaggagttcaagaccagcctggccaacatggtggaacccccatatctactaaaaataacaaaattagcmgagtgtggtggcacatgtctataatcccagctacttgggaggctgaggcaggagaatcacttgaacccaggagatggaggttgcagtgagccaagatcac

SEQ ID NO: 12207 - DNA, 201 bp, Homo sapiens; identical to SEQ ID NO: 4870

SEQ ID NO: 12208 - DNA, 201 bp, Homo sapiens
ctggatagaattctcaccatctggacagaactctcactatcggtctggataaaattctcaccatctgtgtagaattctcactatctgcatagaattcttaytctctggatagaactctctcgtattcctcgatagaactctgaccatctggatagaactctcactatctatctggatagaattctcattctctggatagaa

SEQ ID NO: 12209 - DNA, 201 bp, Homo sapiens
gaggctgaggcaggcagatcacatgaggtcaggagtttgagaccagcctggccaacatggtgaaactctgtctctaataaaaatatatgaattagctgggkgcgtgacgcttgcctatagtaccagctacttgggaggctgaggcacgagaattgcttgaacctgagaggcggaggttgcagtgagctgagattgtgccac

SEQ ID NO: 12210 - DNA, 201 bp, Homo sapiens
aaaagaaaaagtaaaagtaccactgatgaaaagaagagagatgggtgtagatacagtcagaacatatatgtacactgtgctgtagttttaaattgtttccrcttctattatttctctatttttttctccattatttctcaaaatagatttggttttgcatgtttaaaagacgctctataaatgctccaaattagtcctcac

SEQ ID NO: 12211 - DNA, 201 bp, Homo sapiens
gggttcaagcgagtctcatgtctcagcctcccaagtagctgggattacaggtgggtgccactatgcctggctcatttttttttgtattttttgtagagatrtggttttgccatggtggccaggctgatctccaactcctggcctcaggtgatctgcttgccttggcctctcaaagtgctgggattacaggcatgagtcact

SEQ ID NO: 12212 - DNA, 201 bp, Homo sapiens
ttgcctaggctggattgcagtggtgtgatctcggctcactgcaacccgctcctcctgggttcaagcgagtctcatgtctcagcctcccaagtagctgggaytacaggtgggtgccactatgcctggctcatttttttttgtattttttgtagagatatggttttgccatggtggccaggctgatctccaactcctggcctc

SEQ ID NO: 12213 - DNA, 201 bp, Homo sapiens
aaatacaaaaaattagctgggtgtcgtggtgggtgcctgtagtcccagctacttgggaggttgaggcaggagaatggcgtgaacctgggaggtggagcttscagtgagtcgagatcgcgccactgcactccagcctgggcaacagagcacgatcccgtctcttagaaaggaatgaataaattacactgaatagtctcctgt

SEQ ID NO: 12214 - DNA, 201 bp, Homo sapiens
atcacgaggtcaggagatcgagaccgtcctggctatcacggtgaaaccccgtctctactaaaaatacaaaaaattagctgggtgtcgtggtgggtgcctgwagtcccagctacttgggaggttgaggcaggagaatggcgtgaacctgggaggtggagcttgcagtgagtcgagatcgcgccactgcactccagcctgggc

SEQ ID NO: 12215 - DNA, 201 bp, Homo sapiens
ggccgaggcgggcagatcacgaggtcaggagatcgagaccgtcctggctatcacggtgaaaccccgtctctactaaaaatacaaaaaattagctgggtgtmgtggtgggtgcctgtagtcccagctacttgggaggttgaggcaggagaatggcgtgaacctgggaggtggagcttgcagtgagtcgagatcgcgccactg

SEQ ID NO: 12216 - DNA, 201 bp, Homo sapiens
gaggccgaggcgggcagatcacgaggtcaggagatcgagaccgtcctggctatcacggtgaaaccccgtctctactaaaaatacaaaaaattagctgggtktcgtggtgggtgcctgtagtcccagctacttgggaggttgaggcaggagaatggcgtgaacctgggaggtggagcttgcagtgagtcgagatcgcgccac

SEQ ID NO: 12217 - DNA, 201 bp, Homo sapiens
ggccaggcacagtggctcatacctgtaatcctagcactttgggaggccgaggcgggcagatcacgaggtcaggagatcgagaccgtcctggctatcacggkgaaaccccgtctctactaaaaatacaaaaaattagctgggtgtcgtggtgggtgcctgtagtcccagctacttgggaggttgaggcaggagaatggcgtg

SEQ ID NO: 12218 - DNA, 201 bp, Homo sapiens
tccacctttctttctccctaccagtttggaagcattttcagaggaaggtgttcaaactccctactcctcagtgtgtctagagtatcctcctgcacgcgcgygcacacacacacacacacacacacacacacacactcccctccatttgacagatgaggagactcaaatccaaagaaattgagggattctcgtaaggacaca

SEQ ID NO: 12219 - DNA, 201 bp, Homo sapiens; identical to SEQ ID NO: 4871

SEQ ID NO: 12220 - DNA, 201 bp, Homo sapiens; identical to SEQ ID NO: 4872

SEQ ID NO: 12221 - DNA, 201 bp, Homo sapiens; identical to SEQ ID NO: 4873

SEQ ID NO: 12222 - DNA, 201 bp, Homo sapiens; identical to SEQ ID NO: 4874

SEQ ID NO: 12223 - DNA, 201 bp, Homo sapiens; identical to SEQ ID NO: 4875

SEQ ID NO: 12224 - DNA, 201 bp, Homo sapiens; identical to SEQ ID NO: 4876

SEQ ID NO: 12225 - DNA, 201 bp, Homo sapiens; identical to SEQ ID NO: 4877

SEQ ID NO: 12226 - DNA, 201 bp, Homo sapiens; identical to SEQ ID NO: 4878

SEQ ID NO: 12227 - DNA, 201 bp, Homo sapiens; identical to SEQ ID NO: 4879

SEQ ID NO: 12228 - DNA, 201 bp, Homo sapiens; identical to SEQ ID NO: 4880

SEQ ID NO: 12229 - DNA, 201 bp, Homo sapiens; identical to SEQ ID NO: 4881

SEQ ID NO: 12230 - DNA, 201 bp, Homo sapiens; identical to SEQ ID NO: 4882

SEQ ID NO: 12231 - DNA, 201 bp, Homo sapiens; identical to SEQ ID NO: 4883

SEQ ID NO: 12232 - DNA, 201 bp, Homo sapiens
ccaaggttttggtgataagtatgctcattgcttgtggaacatctctgctcccaggctctctcagtgaacagagttagggagtgtgtgtgtgtgtgcgcgcrcgcgcgcgcatgtgcatacatatacacctaagtacacatgagtttactctgataacatccatttccaatccagcatcacagagttgatcctaggttcttc

SEQ ID NO: 12233 - DNA, 201 bp, Homo sapiens
ccgcacctggtgtcacaggttcatcttgtattttcccatctcagccctggaatccgatgtttctccagagaatctgggttcctcttagtggaaaatggtayttagaagccaaggttttggtgataagtatgctcattgcttgtggaacatctctgctcccaggctctctcagtgaacagagttagggagtgtgtgtgtgtg

SEQ ID NO: 12234 - DNA, 201 bp, Homo sapiens
tggccagtgggaaccccgtcgagctggcttctgcatccttttgatatgtcctcatcatcctttgagggctgaaacaaccaagagtttcaggctcatttttkgttttttttttttttttttgagacagaatctcattctgtggcccaggctggagtgcaatggcgcgatctcggctcactgcaacctctgcctcccaggttc

SEQ ID NO: 12235 - DNA, 201 bp, Homo sapiens; identical to SEQ ID NO: 1274

SEQ ID NO: 12236 - DNA, 201 bp, Homo sapiens
ccatgtcaatataaaggagatcgtcggaatatggggagattgtgcgaatatggggagaccatgggaatatggggagactgtgggaatatggggagatcatrtgaatatgcaggagaccgtgtcaatataaaggagacagtggggatatggggagaccatgagaatatagggagaccatgggaatatgaagaaactgtgtga

SEQ ID NO: 12237 - DNA, 201 bp, Homo sapiens
cgtgggaatatgaagagactgtgtgaatatgggggagaccatgtcaatataaaggagatcgtcggaatatggggagattgtgcgaatatggggagaccatrggaatatggggagactgtgggaatatggggagatcatgtgaatatgcaggagaccgtgtcaatataaaggagacagtggggatatggggagaccatgaga

SEQ ID NO: 12238 - DNA, 201 bp, Homo sapiens
ctgtaacctgggcccctccacatccctctcgactcagccacgcagagtgagctttccaaggtgcaaacccatgcccccctttgttcaaatcttcccagggytgctcaatccctgcggcctccccagctttctgaagcccccagcacaccccaccctctcacctctgagcctgcccagctattgtctctgggaatgtcatgc

SEQ ID NO: 12239 - DNA, 201 bp, Homo sapiens
ctttgccaaggtgactgggcagggttgagagcaagtgccccccccacccaccagggtgggggtaagtgtggagaaaacgttgctacaaggaaggcttttcygaaccatggggccgtgggtcatgtgaagtcaccgatgccaccagatgccacattttctaggggagtttcagagacttgaacttttattttaaacatttac

SEQ ID NO: 12240 - DNA, 201 bp, Homo sapiens
ttttattctttaagcaaaattaagatatcctcaccggctggaagatcgtagaaatagcatagggtcattgagaaaaatggagacaataggagagaatctcwggttaaaagggaagtcgtggtcataccagccctcaaagaaagccagacggcactgtgtggcgtgtgtctttcctgatgtttccatgcatacacacatttg

SEQ ID NO: 12241 - DNA, 201 bp, Homo sapiens
tctggatagaactctcactatctggatagaattctcaccctctggatagaactgtcactgtctatctggatagaactctccccatctggattgaactctcrctatctggatagaattctcactctctggatggaacgctcactatctgggagcctaactactcagcctcccccgaccagcccaacttctccccatggaggg

SEQ ID NO: 12242 - DNA, 201 bp, Homo sapiens
ctctggatagaactctcactatctggatagaatgctcactctctggatagaactctcactatctggatagaattctcaccctctggatagaactgtcactrtctatctggatagaactctccccatctggattgaactctcgctatctggatagaattctcactctctggatggaacgctcactatctgggagcctaacta

SEQ ID NO: 12243 - DNA, 201 bp, Homo sapiens
ctggatagaattctcaccctctggatagaactctcactttctggatagaattctcaccctctggatagaactctcactatctggatagaattctcactctstggatagaactctcactctctggatagaactctcactatctggatagaatgctcactctctggatagaactctcactatctggatagaattctcaccctc

SEQ ID NO: 12244 - DNA, 201 bp, Homo sapiens
ctggatagaattctgtctctggatagaagtctcattatctgtctggatagaattctcaccatctgcatagaatattcactatctgtctggatagaattctsaccagctggagagaactctcactatctggatagaataatcatcgtctggatagaactctgactctctgtctggatagcactctcactacctttctggata

SEQ ID NO: 12245 - DNA, 201 bp, Homo sapiens
cttactctctggatagaactctcactatctttctcgatagaactgtcaccctctggatagaattcgcactatctatctggatagaattctgtctctggatrgaagtctcattatctgtctggatagaattctcaccatctgcatagaatattcactatctgtctggatagaattctgaccagctggagagaactctcacta

SEQ ID NO: 12246 - DNA, 201 bp, Homo sapiens
tccctgtgctcaggtggcagcctggcttcctgacggtgtgtcatcctcaggccagccatccccagaataggggccaaaaggcacctgccgacctggccatyggggaataatttaaagtaaccccagagaggggttaccagaagtcaagtgtccacagcaaacctgaaaactcttttttacattttatattgttactggaag

SEQ ID NO: 12247 - DNA, 201 bp, Homo sapiens
acctttctttctccctaccagtttggaagcattttcagaggaaggtgttcaaactccctactcctcagtgtgtctagagtatcctcctgcacgcgcgcgcrcacacacacacacacacacacacacacacactcccctccatttgacagatgaggagactcaaatccaaagaaattgagggattctcgtaaggacacatat

SEQ ID NO: 12248 - DNA, 201 bp, Homo sapiens; identical to SEQ ID NO: 4893

SEQ ID NO: 12249 - DNA, 201 bp, Homo sapiens; identical to SEQ ID NO: 4894

SEQ ID NO: 12250 - DNA, 201 bp, Homo sapiens
ttgagcagcctgtggacaggtaaggcctgcccccggggcctgggccagctttgttaggactcatgtgactggatgaagcctgctttcatctggagatggayacttatcacttagatccaactcgaggctggcccttctggaagcagaggcctttgcccactgccctggaggccaaaggaatgattccattagagattccag

SEQ ID NO: 12251 - DNA, 201 bp, Homo sapiens
tgctcctgggtcccagcacaccctcctgccacagcctcatcatcaccaggagggaaggttgctatctgggggcactgctacttttaaacgtttataataayggcagtgaaggtgctggcttcatatccttgcaagggctgttctttgcagatcctcggggagcttccggagcactgtgcctacatcatcatctacgggatg

SEQ ID NO: 12252 - DNA, 201 bp, Homo sapiens
ctaaaaaaaagaagtcctcattgtattttaccttttcagagcctcactgtggccccccagcaggccaggcaggtgtttccaggaagcagaggttcagagargctacgtggctctccaaggccacacagctacttgatctggtcagggggagtagggacttgaaaccaggtcttaggacagcaggtgcccattgctgccctg

SEQ ID NO: 12253 - DNA, 201 bp, Homo sapiens
atgacctggccacatcttctgcctcccagcagcgtgaccccactagacaccaactgcctcccgagtcctacgaagatgcctggggcggtgcagcagtttamgacgctgatccggtaattatctgtcattttattactgaacccgcccccctgcccaagtctttgtatatcacattaagccctttctattaaagtgaattta

SEQ ID NO: 12254 - DNA, 201 bp, Homo sapiens
ctgcccaagtctttgtatatcacattaagccctttctattaaagtgaatttaaaggagaaagtgagaggtagagtcatttgaaaaaaacagcatccagcarggcgttggtggcttatgcctgtaatcccagcactctgggaggctgtggtgcgtggatcacttaagttcaggagttcgagaccagcctgggcaacaaggtg

SEQ ID NO: 12255 - DNA, 201 bp, Homo sapiens
tacttgggaggttgaggcaggagaatcgcttgaatccgggaggcagaggttgcagtgagccgagattgagccaccgcactccagcctggtgacagagcgakactctgtctcaaaaaaaaaaaaaaaaaaacccaaggctctcgaggcatgcatgctgttcagcgagccctgccctgcattgcgaaagggtagagatttgtt

SEQ ID NO: 12256 - DNA, 201 bp, Homo sapiens
tgagagcagctgtagactatagtaacgtacagccggtgtggctgtcttctaagaaagtattatttacaaaaacaggcaggttgctagatttgacctgaggstgtagtttgcagagccttggtaaaggttttcaaatttgcattttaagccctccaatttcaagttatgctattggtggggaattttaattaaacagaaaat

SEQ ID NO: 12257 - DNA, 201 bp, Homo sapiens; identical to SEQ ID NO: 4901

SEQ ID NO: 12258 - DNA, 201 bp, Homo sapiens; identical to SEQ ID NO: 4902

SEQ ID NO: 12259 - DNA, 201 bp, Homo sapiens; identical to SEQ ID NO: 4903

SEQ ID NO: 12260 - DNA, 201 bp, Homo sapiens
taatgggaatgtcacagcaagggcacatccaggcctgggttgaagacgctactttatggtggctcacacctgtaatcccagcactttgggaggctgaggcrggcggatcacctgaggtcgggagttcaagaccaacctgaccaacatgacaaaaacacgcctctactaaaaatacaaaaattagccgggtgcagtggtggg

SEQ ID NO: 12261 - DNA, 201 bp, Homo sapiens
cccatctcagccctggaatccgatgtttctccagagaatctgggttcctcttagtggaaaatggtatttagaagccaaggttttggtgataagtatgctcwttgcttgtggaacatctctgctcccaggctctctcagtgaacagagttagggagtgtgtgtgtgtgtgcgcgcgcgcgcgcgcatgtgcatacatataca

SEQ ID NO: 12262 - DNA, 201 bp, Homo sapiens
cagccctggaatccgatgtttctccagagaatctgggttcctcttagtggaaaatggtatttagaagccaaggttttggtgataagtatgctcattgcttktggaacatctctgctcccaggctctctcagtgaacagagttagggagtgtgtgtgtgtgtgcgcgcgcgcgcgcgcatgtgcatacatatacacctaagt

SEQ ID NO: 12263 - DNA, 201 bp, Homo sapiens
gttttggtgataagtatgctcattgcttgtggaacatctctgctcccaggctctctcagtgaacagagttagggagtgtgtgtgtgtgtgcgcgcgcgcgygcgcatgtgcatacatatacacctaagtacacatgagtttactctgataacatccatttccaatccagcatcacagagttgatcctaggttcttccctct

SEQ ID NO: 12264 - DNA, 201 bp, Homo sapiens
agctacagtgctgcacactagggggccacatcatggtttataagaccccacctagacattatcttgtcttgagatgtgttatgaaaatgggaggaagggcygggtgcagtggctcatgcctgtaatcccagcactttcagaggctgaggcaggcagatcacatgaggtcaggagtttgagaccagcctggccaacatggtg

SEQ ID NO: 12265 - DNA, 201 bp, Homo sapiens; identical to SEQ ID NO: 4908

SEQ ID NO: 12266 - DNA, 201 bp, Homo sapiens; identical to SEQ ID NO: 4909

SEQ ID NO: 12267 - DNA, 201 bp, Homo sapiens; identical to SEQ ID NO: 4927

SEQ ID NO: 12268 - DNA, 201 bp, Homo sapiens; identical to SEQ ID NO: 4928

SEQ ID NO: 12269 - DNA, 201 bp, Homo sapiens; identical to SEQ ID NO: 4929

SEQ ID NO: 12270 - DNA, 201 bp, Homo sapiens; identical to SEQ ID NO: 4930

SEQ ID NO: 12271 - DNA, 201 bp, Homo sapiens
gacttgaacttttattttaaacatttaccaaaacaccaggactgtggaccaggaatgatagttttctggccagaaggaatctaaaaaaaagaagtcctcaytgtattttaccttttcagagcctcactgtggccccccagcaggccaggcaggtgtttccaggaagcagaggttcagagaggctacgtggctctccaaggc

SEQ ID NO: 12272 - DNA, 201 bp, Homo sapiens
aggcaaggcctgagccgctgtaagccttaggagtttaggaaggctccagaagacaaatggggtctgtagaggctgttaactcagccaggcttcttagagtygcatttcactaactgatatggtttggctctgcgtcctcacccaaatctcaccttgaattgtaataatccccaagtgtcaagggcgggaccagatggagat

SEQ ID NO: 12273 - DNA, 201 bp, Homo sapiens
gtgtgtgtgtgtgtgtatatatatatatatatatataattttttttttgtaaaatgtactatccctggagcttataaaacatccagagtgcaaagacaatsactgacctttcagaggcacccaggaaccccctggtcagattcaaggatccatattcccacagctccccagggacccagatgggacatggtggggtctggg

SEQ ID NO: 12274 - DNA, 201 bp, Homo sapiens
tcctgacctcaggtgatccacctgcctcagccttccaaagtgctgagattacaggcatgagccaccatgcctggcctgtacatgcttttcattcttcttaycttcagacctagaaacagcagctacaggttctcagcatgggtcctgcttccgtgtttggtagaacctgggttggggcctattgtgtgtaggtgaggacat

SEQ ID NO: 12275 - DNA, 201 bp, Homo sapiens
tgatctccaactcctggcctcaggtgatctgcttgccttggcctctcaaagtgctgggattacaggcatgagtcactgcaccgagcatctcctggttgttwatagattcagtgttgtttggcttcaggtttacttgcctgtgtaaaaaaaacaaaaacaaaaaacaaaacaacaacaaacaactttagacaaataaatagt

SEQ ID NO: 12276 - DNA, 201 bp, Homo sapiens
accactttcctttggcccaaccggccttggggtctggagcaccaaacaggccctgaggaagcgtgcaaggaactggaatgcggggaaagtgatgaaatatyttgttggttggcctttgcttgtttgcaaaatatatccaatgctcacacctgagagacaacagacatccttatttgtgaatagtctgcactagataattca

SEQ ID NO: 12277 - DNA, 201 bp, Homo sapiens
aaagacaaatattaaatgaaaattatgctcaaggacatgagaaaaagtgtgcagagtacacacattgcagacttgagaaagaaattgtcctcagaacaatytgcaatacaaagcttgcttaataatttactggaactggtaaactcagcgattatgccaggcactggatcttcaattaagtgtaagaaaataggcttacag

SEQ ID NO: 12278 - DNA, 201 bp, Homo sapiens
tcttctgccagggctttcctgatgcacccaggcagggctcattgcctccttcccctccccataccatgccacctccataggatcagggcacaggctccatygtctctggtgtggggccgctgagtctcctcagcccacacagtccatgaagctgagcacgtgcagggatgcctcatcacatccctctcgagaattgctatg

SEQ ID NO: 12279 - DNA, 201 bp, Homo sapiens
gcaggagaattgcttgaacccgggaggcagaggttgcagtgagccaagattgcgccatgacactccagcctgggcaacagaacaagactctctttcaaagaaaaaaaaaaagaagaagaaaagaaaagtagtgactcagccaagagacatgggagggcctcaggctctctcctgtgctgtcttcaaagcatctttccggag

SEQ ID NO: 12280 - DNA, 201 bp, Homo sapiens
ggcaatctcggctcactgcaacctccgcctcccaggtgcaagcaattcttttgcctcagcctcccaagtagctgggattacaggcatgtgccaccacaccyggctaattttgtattttcagtagagacagggtttctccatgttgctcaggctggtcttgaactcctgacctcaggtgatccacccacctcggcctcccaa

SEQ ID NO: 12281 - DNA, 201 bp, Homo sapiens
ctcaggaggctgaggtaggagaatcgcttgaacccaggaggcggaggttgcagtaagccgagatcacgccaacctggacaacaaaacaagactccatctcaaaaaaaaaaaaaaaaaattagccaggctcgtgcctgtagtcccaactacttggaaggctgaggcaggagactcgcttgaacccaggagatggaggttgca

SEQ ID NO: 12282 - DNA, 201 bp, Homo sapiens
ggcgtgtgcctgtagtcccagctactcaagaggctgaggcaggagaattgcttgaacctggaaggtagaggttgcagtgaaccgaaattgtgccaatgcaytccagctggggctacagagcgagcctacccctcaaaataaataaataaatagaatactttttttttaagtatcctactggaaatgttgggtagacaatta

SEQ ID NO: 12283 - DNA, 201 bp, Homo sapiens
tgagaagccctccctggtggggctcacctgtgttaggtatcctgtgccagatcaggcctctctgtgtcctcccctcccctggcattctctcccgactctgyccgctcacagggtaagatgatgtcattgacaagatgatctatttagtaacaatgagagcagtatctgttttgctcacttttgtattctcaggactctaat

SEQ ID NO: 12284 - DNA, 201 bp, Homo sapiens
gagggaggaatgggagtcagggtgcagggagtggggcttcccagttcccagcccaccagggctaagggcagtgttctcaattagttccagcaaccctgccrgcaagcacatcacctgtgtccctcttaacaaatgaggaaattgaggctcagagaaaggacttgcaggtgcaaaggcaggaactcacagcttaggggcatc

SEQ ID NO: 12285 - DNA, 201 bp, Homo sapiens
gctaagaccacagggcaagtgaagctcacccaggcaaagaaggaaaaacatgggtccaagctgactggaaaggcccagaggccatcataagacactgggasggggagggcccagaacagtgcacacaggccagaccacagtagtgggcaagggggtggggtttatcctttggccaatggaaagctatttgggagttttagg

SEQ ID NO: 12286 - DNA, 201 bp, Homo sapiens
ctggggagggcagaggacaggtcagccctggctcccctggccttcagggaccagctctggccctcccagatgcctctgtctcccccaccctcggctgctgygctgtgccagtgggtcctgcagggctttgcattcctcactcaggtcttccattcaagaaatgttcattgactgatactgagcagggcaccagggtgagtg

SEQ ID NO: 12287 - DNA, 201 bp, Homo sapiens
cctgcttccagcaagtcttcccaggcacatcagtgagtccttggcagcccatgaaatgacaagtcacacggaaggagggcaaagaaggcaggggagtcacrcagcctggttcctagaagactccaggaccctctctgggccttggtctcctcaagataacaaggggtcaagataaggggctctctgaggtctctgactctg

SEQ ID NO: 12288 - DNA, 201 bp, Homo sapiens
cagaagccggcagcgagactcacctcttcctggagctgcatctggatttccttctccgaagccagctgcttctgcaacttttcagtctcagccccatactsgaaggacccaaaaccagtgaacccccatctgaggcctacccactcagggcaccccctgcttccagcaagtcttcccaggcacatcagtgagtccttggca

SEQ ID NO: 12289 - DNA, 201 bp, Homo sapiens
ccaggcatggagggggtggaaacggacaagactcagttcctgctagtcctctccagagtcaggtagctgccaagggcctggggtccccactctgggccagyggctctccagggtgggggcagaagccggcagcgagactcacctcttcctggagctgcatctggatttccttctccgaagccagctgcttctgcaactttt

SEQ ID NO: 12290 - DNA, 201 bp, Homo sapiens
gaacccacccacacgctctgctgggacccaggcacacccagtccagcactcctgcctatctgctctcaggctgaggccagaggcccaggttctggactccragtgtcatgtgggggacccagggcaggtccctgcactccacaccactcagaccttgatggaactgtcacctgctgggctgtgccaggcatggagggggtg

SEQ ID NO: 12291 - DNA, 201 bp, Homo sapiens
cctcctcctgcatctcaatcagcatgcccccacaatccatgtacttctcccgcaggtcctgcagctgggaacccacccacacgctctgctgggacccaggyacacccagtccagcactcctgcctatctgctctcaggctgaggccagaggcccaggttctggactccgagtgtcatgtgggggacccagggcaggtccct

SEQ ID NO: 12292 - DNA, 201 bp, Homo sapiens
tgggtggcagacccagtggacaccgggggttgctggcggagggtcttcacctcctcctgcatctcaatcagcatgcccccacaatccatgtacttctcccrcaggtcctgcagctgggaacccacccacacgctctgctgggacccaggcacacccagtccagcactcctgcctatctgctctcaggctgaggccagaggc

SEQ ID NO: 12293 - DNA, 201 bp, Homo sapiens
ggctgagacacaggcacagacgtaggaaagtgggcagccaggggagggtcctcaccagaggcacgctgtatgggtaatgggtggcagacccagtggacacygggggttgctggcggagggtcttcacctcctcctgcatctcaatcagcatgcccccacaatccatgtacttctcccgcaggtcctgcagctgggaaccca

SEQ ID NO: 12294 - DNA, 201 bp, Homo sapiens
atgtccctgaccctgcacggaatacaccaacagggttaacacccacttctgcctccctcctgcatgatttaaccttcatagcccaccccacagctacttgmcataggaacaaatccattctagacaggctcagacaggtcaaatgacttgcccaaggacacacagtcaggaaagggaccacgctgggccttagtcccaggt

SEQ ID NO: 12295 - DNA, 201 bp, Homo sapiens
cctcccagccctcggtctcctctgacaccagctctgcctcttccatcaccccttcctcagccggcaccttcttggcagcccccagctcctcctggggcacsaactcctccgcaggcgtgaaatcttccccccgcatgatatccgctgccagcatcaacccttcctcagcctcaaacccccgcacctgctctcgatcctcac

SEQ ID NO: 12296 - DNA, 201 bp, Homo sapiens
agcctgggtcagcccccaggctgctccaccatcccacccaccgccccccgtgtttgttttgactgctgctgccactgctgcagagttggagagcctggggkatagaggaggcaggggttgggggtaggggaagcaagcgggcagagatgggaagctgaggcgcagtgtgggggcacagtcccagccctaacccccagccca

SEQ ID NO: 12297 - DNA, 201 bp, Homo sapiens
ccggtggaagctgggccctgttccctgctcagggctgagtctggtagccagcgggcctctcccgggcttctcctgccccctgggctgccatgtggcccagrcctggcagccacagcttttgcaccagctgcagagcgagggccggggttcctaccgcctgtccctgaagacgttggaaaagcctccaacatgtgggaaagg

SEQ ID NO: 12298 - DNA, 201 bp, Homo sapiens
catcaaggggtgaggggcacattgttgggaaggcgctcacaactccctgccggtggaagctgggccctgttccctgctcagggctgagtctggtagccagygggcctctcccgggcttctcctgccccctgggctgccatgtggcccaggcctggcagccacagcttttgcaccagctgcagagcgagggccggggttcct

SEQ ID NO: 12299 - DNA, 201 bp, Homo sapiens
agctattgaggaacaaaggtgtgggaaagggcagaacatggaagaggaagccaggggcagggagggggggatcaagacagaggggagaggggctgggccayggatgggagcctggacacccccaggccactggcagaagagggagggagggagaggagacacaccactgggcagaggggccctcacccacccacacacaga

SEQ ID NO: 12300 - DNA, 201 bp, Homo sapiens
tctcagctcaccgcaacctccacctcctggattcaagcgattctcctgtctcagcctcccgagtagctgggattacaggcatgtgtgccaccatgcccagytaattttgtatctttagtggagacggggtttctccattggtcaggctggtctcgaactcctgacctcaggtgatccacctgcctcgccctcccaatgtgc

SEQ ID NO: 12301 - DNA, 201 bp, Homo sapiens
tggggtgtaatggtgcaatctcagctcaccgcaacctccacctcctggattcaagcgattctcctgtctcagcctcccgagtagctgggattacaggcatstgtgccaccatgcccagttaattttgtatctttagtggagacggggtttctccattggtcaggctggtctcgaactcctgacctcaggtgatccacctgc

SEQ ID NO: 12302 - DNA, 201 bp, Homo sapiens
aaagtgctgggattacaggcatgagccaccgcgcccagctttatttatttatttatttatttttgacacagagtttcgctgttgttgcccaggctggagtgcaatggggcaatctcggctcactgcaacctccgcctcccaggtgcaagcaattcttttgcctcagcctcccaagtagctgggattacaggcatgtgccac

SEQ ID NO: 12303 - DNA, 201 bp, Homo sapiens
tatgaaaaccatggattgaatggaccattttatgtattcagagagacgagccaccatcattgccagaaataccatgtaaaaattggcaatttggccagccrcagtggctcacgtctgtcatcccagcactttgggaagccaaggcaggcagatcacctgaggtcaggagttcgagaccagcctgaccaatacggtgaaacc

SEQ ID NO: 12304 - DNA, 201 bp, Homo sapiens
gctggattgcagtagtgccatctcagctcactgcaacctccacctcccaggttcaagcgattctcctgcctcagcccctcaagtagctgggattataggcrggcaccaccatgccaggctaatttttgtactttttagtagaggtggggtttcaccatgttgtctaggctggtcctgaactcctgaccccgtgatccaccc

SEQ ID NO: 12305 - DNA, 201 bp, Homo sapiens
acagagtcttgctctgccacccaggctggattgcagtagtgccatctcagctcactgcaacctccacctcccaggttcaagcgattctcctgcctcagccyctcaagtagctgggattataggcgggcaccaccatgccaggctaatttttgtactttttagtagaggtggggtttcaccatgttgtctaggctggtcctg

SEQ ID NO: 12306 - DNA, 201 bp, Homo sapiens
agtcacagctcttgtgccagctgcagaacaagggctggggatcctaccgcctgtcccagaagagggctgaggtccaggcccccaagctccagcctaggttrgacttccaagggtggctaactgtgcatgggaaagcagctatatggaaaacgaatggtagataaaggctagtgagtcaagtttgttattagattgcactgg

SEQ ID NO: 12307 - DNA, 201 bp, Homo sapiens
ccagtgggcctcccccggcttctcctgcccccctgggctgccatgtgacccacatccggcagtcacagctcttgtgccagctgcagaacaagggctggggwtcctaccgcctgtcccagaagagggctgaggtccaggcccccaagctccagcctaggttggacttccaagggtggctaactgtgcatgggaaagcagcta

SEQ ID NO: 12308 - DNA, 201 bp, Homo sapiens
gcctgttgacaccattaccttgagctacccgccacctgagggctgtagaggagggaaagtgttttctctacccatcttaggtccacggctggggctctgtwataaaagacagattacaagagaaaagcaaacaagtttattaacatgtgtatcacacatttaacacacagagtacccagagttgagtaactcagagaggta

SEQ ID NO: 12309 - DNA, 201 bp, Homo sapiens
ccatcattgttcttgtgcctgttgacaccattaccttgagctacccgccacctgagggctgtagaggagggaaagtgttttctctacccatcttaggtccwcggctggggctctgtaataaaagacagattacaagagaaaagcaaacaagtttattaacatgtgtatcacacatttaacacacagagtacccagagttga

SEQ ID NO: 12310 - DNA, 201 bp, Homo sapiens
aactgggagcgtgacaagtccctcctcccttctgtatcaccggtggcaagaataggaggaacccaataaatatttgtaaataattgctcatgagtggctgrtgcaggcattgctggtgtctcactccattccatcattgttcttgtgcctgttgacaccattaccttgagctacccgccacctgagggctgtagaggaggg

SEQ ID NO: 12311 - DNA, 201 bp, Homo sapiens
ttctcctcctccagcagcctcagcttctcctgcaaggcttccagctgtgggcagtggtgctggtgcagcaatgcctcctgcgaaatcctaggggagggagsaatgggagtcagggtgcagggagtggggcttcccagttcccagcccaccagggctaagggcagtgttctcaattagttccagcaaccctgccggcaagca

SEQ ID NO: 12312 - DNA, 201 bp, Homo sapiens
ttccataagaaggaccctaacctggggccccagagagactgccaatcaggaaataaacaagacccccacccctacaggacaaaactagaataagggcttgmctggatcaggaaggcagtacacacctcctccagcaaatataacatcactttgacgtcttcctgggtgatctttttgactggcggaggtaggttaggacac

SEQ ID NO: 12313 - DNA, 201 bp, Homo sapiens
ggttccagaggtggctcgggatcctactctctgtccagtgccccgtgcctgcggctgcgcagagggctccggagcgggactggctgagggcgaaggtgcayaggtgagtgctgctgggtccccgggtccgagccggctccccgcgcagcaccggcccaacctcctcgggcgcatctcgagtctgccgtccgctgctgcggc

SEQ ID NO: 12314 - DNA, 201 bp, Homo sapiens
gggctccggagcgggactggctgagggcgaaggtgcacaggtgagtgctgctgggtccccgggtccgagccggctccccgcgcagcaccggcccaacctcytcgggcgcatctcgagtctgccgtccgctgctgcggcgggacctttataacctgcgccagccgccgggccggaccacgcgtaggggtgggggctgccgag

SEQ ID NO: 12315 - DNA, 201 bp, Homo sapiens
gctgagggcgaaggtgcacaggtgagtgctgctgggtccccgggtccgagccggctccccgcgcagcaccggcccaacctcctcgggcgcatctcgagtcwgccgtccgctgctgcggcgggacctttataacctgcgccagccgccgggccggaccacgcgtaggggtgggggctgccgagaagcaactagtggcaagcg

SEQ ID NO: 12316 - DNA, 201 bp, Homo sapiens
ggcgaaggtgcacaggtgagtgctgctgggtccccgggtccgagccggctccccgcgcagcaccggcccaacctcctcgggcgcatctcgagtctgccgtscgctgctgcggcgggacctttataacctgcgccagccgccgggccggaccacgcgtaggggtgggggctgccgagaagcaactagtggcaagcgggactc

SEQ ID NO: 12317 - DNA, 201 bp, Homo sapiens
ctgctgggtccccgggtccgagccggctccccgcgcagcaccggcccaacctcctcgggcgcatctcgagtctgccgtccgctgctgcggcgggacctttrtaacctgcgccagccgccgggccggaccacgcgtaggggtgggggctgccgagaagcaactagtggcaagcgggactcagagccgcgcgggaggggagct

SEQ ID NO: 12318 - DNA, 201 bp, Homo sapiens
ccttggatggccgagaatgcggacgggcgccgggctcctgccttggctccagcctccgaggccgggcgagctccggtgcgggcttccgagaggaactgggwtccagaggtggctcgggatcctactctctgtccagtgccccgtgcctgcggctgcgcagagggctccggagcgggactggctgagggcgaaggtgcacag

SEQ ID NO: 12319 - DNA, 201 bp, Homo sapiens
aacctcctcgggcgcatctcgagtctgccgtccgctgctgcggcgggacctttataacctgcgccagccgccgggccggaccacgcgtaggggtgggggckgccgagaagcaactagtggcaagcgggactcagagccgcgcgggaggggagctagtggtgacggaacagagcacagtaagaaaagcagggcaagaagggc

SEQ ID NO: 12320 - DNA, 201 bp, Homo sapiens
tgcggcgggacctttataacctgcgccagccgccgggccggaccacgcgtaggggtgggggctgccgagaagcaactagtggcaagcgggactcagagccrcgcgggaggggagctagtggtgacggaacagagcacagtaagaaaagcagggcaagaagggcgagtgcaagttccggatggctccgagttgggatgggag

SEQ ID NO: 12321 - DNA, 201 bp, Homo sapiens
cgggccggaccacgcgtaggggtgggggctgccgagaagcaactagtggcaagcgggactcagagccgcgcgggaggggagctagtggtgacggaacagarcacagtaagaaaagcagggcaagaagggcgagtgcaagttccggatggctccgagttgggatgggagcgaaagattttttctgccctctccatctccgga

SEQ ID NO: 12322 - DNA, 201 bp, Homo sapiens
agccaggctggggcaggtgagcactcggggagcttatccaccctctcttttcatcggcacgacgatctgcagcttgtccggctggcggcagggagggcccygtgggggcactcacctttctggagcatcttccacctcagctgccgcctgtaatgggcatcttgccagttggccagctgctggaggacataattcatgtcc

SEQ ID NO: 12323 - DNA, 201 bp, Homo sapiens
cgttcatccgcgttgcctcatccagctccagttccacctcctcccagccctcggtctcctctgacaccagctctgcctcttccatcaccccttcctcagcyggcaccttcttggcagcccccagctcctcctggggcaccaactcctccgcaggcgtgaaatcttccccccgcatgatatccgctgccagcatcaaccctt

SEQ ID NO: 12324 - DNA, 201 bp, Homo sapiens
ctcggtctcctctgacaccagctctgcctcttccatcaccccttcctcagccggcaccttcttggcagcccccagctcctcctggggcaccaactcctccrcaggcgtgaaatcttccccccgcatgatatccgctgccagcatcaacccttcctcagcctcaaacccccgcacctgctctcgatcctcactgtagcgaaa

SEQ ID NO: 12325 - DNA, 201 bp, Homo sapiens
gatatgcaaagtccatgcaaataagcacagcaggtagagccaggctggggcaggtgagcactcggggagcttatccaccctctcttttcatcggcacgackatctgcagcttgtccggctggcggcagggagggccccgtgggggcactcacctttctggagcatcttccacctcagctgccgcctgtaatgggcatcttg

SEQ ID NO: 12326 - DNA, 201 bp, Homo sapiens
gggccagtggctctccagggtgggggcagaagccggcagcgagactcacctcttcctggagctgcatctggatttccttctccgaagccagctgcttctgmaacttttcagtctcagccccatactcgaaggacccaaaaccagtgaacccccatctgaggcctacccactcagggcaccccctgcttccagcaagtcttc

SEQ ID NO: 12327 - DNA, 201 bp, Homo sapiens
tcctcactgtagcgaaaatcatacctgggcgggagatagcgacatcttttgaggggctggaaagtccaaccccccaggcccacccccacccgtctccacayagaccctgatggttcctcctggttctgtcccagccaggggagaggggagctaggtaccagctccaaggcttcaaatacccagcccatccccctggtggga

SEQ ID NO: 12328 - DNA, 201 bp, Homo sapiens
gcagctccttcccagaacagttctcagttcagccagccgagatagcagggccttctccggagttgcagggtggcagaaccagaggcaggtgggctgtctgsctgctgaaagctgagggcaggttgtaggggagcccctggcaggcttaccttaggctggatgtgtcccctctgggcatctcataattccttcaaagagaaa

SEQ ID NO: 12329 - DNA, 201 bp, Homo sapiens
agcttcagtccccactcagagctgcctggaatcagacggccacccagggggcaagatttgaaggaaaagtggggcagctccttcccagaacagttctcagytcagccagccgagatagcagggccttctccggagttgcagggtggcagaaccagaggcaggtgggctgtctggctgctgaaagctgagggcaggttgtag

SEQ ID NO: 12330 - DNA, 201 bp, Homo sapiens
cccactacaggaaaggccatggcctatggggcaagggagggccccagccacgcacctctccataaaatacacagggtctgagatcatcctccttagagacrttctgagctcctcagccagcgtctcctggaaaccaggaagagtctcctatggtggagagaacagacgttaccagaggacccccacagaacccccacccat

SEQ ID NO: 12331 - DNA, 201 bp, Homo sapiens
cagacgttaccagaggacccccacagaacccccacccataggctcaggcacagaagggaactgggatctcaatcagccaccaaggctgagacacaggcacrgacgtaggaaagtgggcagccaggggagggtcctcaccagaggcacgctgtatgggtaatgggtggcagacccagtggacaccgggggttgctggcggag

SEQ ID NO: 12332 - DNA, 201 bp, Homo sapiens
gcacagaagggaactgggatctcaatcagccaccaaggctgagacacaggcacagacgtaggaaagtgggcagccaggggagggtcctcaccagaggcacrctgtatgggtaatgggtggcagacccagtggacaccgggggttgctggcggagggtcttcacctcctcctgcatctcaatcagcatgcccccacaatcca

SEQ ID NO: 12333 - DNA, 201 bp, Homo sapiens
tggaggggctgatgcagtgaacgaggcgggtatagggaagcgtggaaggtcagagtgtgagggcaaaccccctccccactacaggaaaggccatggcctayggggcaagggagggccccagccacgcacctctccataaaatacacagggtctgagatcatcctccttagagacgttctgagctcctcagccagcgtctcc

SEQ ID NO: 12334 - DNA, 201 bp, Homo sapiens
agtgcccagccctgggcagcacacaggtggctcaggcccctcctcctgccccctcccctggcctgaccctgggaaaaaaaacacctggaacagggtaggtmatagaaagagcccctaagggtcggtgccagggacctgggggggacaggcaccggggttactttctgcaggggagcagggtggaggggcaccctgaactag

SEQ ID NO: 12335 - DNA, 201 bp, Homo sapiens
aaaatcaacattttattcactaatgagtatcaataaaataagtccaaattatggaaaccaaaaaaataataaaaaataaagttgtctccagatatttaacttttttttttttttttttgagacagagtctcactctgttgcccaggctggagtgcagtggcacgatcttagctcactacaagctctgcctcccgggttcac

SEQ ID NO: 12336 - DNA, 201 bp, Homo sapiens
taaaaaataaagttgtctccagatatttaacttttttttttttttttttgagacagagtctcactctgttgcccaggctggagtgcagtggcacgatcttrgctcactacaagctctgcctcccgggttcacgccattctcctgcctcagcgtcccaagtagctgggattacaggcgcccaccaccacgcctggctaattt

SEQ ID NO: 12337 - DNA, 201 bp, Homo sapiens
ggctgaggtaggagaatcgcttgaacccaggaggcggaggttgcagtaagccgagatcacgccaacctggacaacaaaacaagactccatctcaaaaaaamaaaaaaaaaattagccaggctcgtgcctgtagtcccaactacttggaaggctgaggcaggagactcgcttgaacccaggagatggaggttgcagtgagcc

SEQ ID NO: 12338 - DNA, 201 bp, Homo sapiens
cagtagtcccagctactcaggaagctgaggcaggagaatcacttgaacccaggaggcaggggttgcagtgagccaagactgcaacactgtactccatctcaaaaaaaaaaagaaagaaagaaagagagagagagagagagagagagagagagagaaggaaagaaagaaaagaaagaaagaaagaaaagaaagaaaagaaag

SEQ ID NO: 12339 - DNA, 201 bp, Homo sapiens
agtagtcccagctactcaggaagctgaggcaggagaatcacttgaacccaggaggcaggggttgcagtgagccaagactgcaacactgtactccatctcaaaaaaaaaaagaaagaaagaaagagagagagagagagagagagagagagagagaaggaaagaaagaaaagaaagaaagaaagaaaagaaagaaaagaaaga

SEQ ID NO: 12340 - DNA, 201 bp, Homo sapiens
gtagtcccagctactcaggaagctgaggcaggagaatcacttgaacccaggaggcaggggttgcagtgagccaagactgcaacactgtactccatctcaaaaaaaaaaagaaagaaagaaagagagagagagagagagagagagagagagagaaggaaagaaagaaaagaaagaaagaaagaaaagaaagaaaagaaagaa

SEQ ID NO: 12341 - DNA, 201 bp, Homo sapiens
gctactcaggaagctgaggcaggagaatcacttgaacccaggaggcaggggttgcagtgagccaagactgcaacactgtactccatctcaaaaaaaaaaagaaagaaagaaagagagagagagagagagagagagagagagagaaggaaagaaagaaaagaaagaaagaaagaaaagaaagaaaagaaagaaaagaaagaa

SEQ ID NO: 12342 - DNA, 201 bp, Homo sapiens
tgaggcaggagaatcacttgaacccaggaggcaggggttgcagtgagccaagactgcaacactgtactccatctcaaaaaaaaaaagaaagaaagaaagagagagagagagagagagagagagagagagaaggaaagaaagaaaagaaagaaagaaagaaaagaaagaaaagaaagaaaagaaagaaaagaagaaagaaag

SEQ ID NO: 12343 - DNA, 201 bp, Homo sapiens
aggcaggagaatcacttgaacccaggaggcaggggttgcagtgagccaagactgcaacactgtactccatctcaaaaaaaaaaagaaagaaagaaagagagagagagagagagagagagagagagagaaggaaagaaagaaaagaaagaaagaaagaaaagaaagaaaagaaagaaaagaaagaaaagaagaaagaaagaa

SEQ ID NO: 12344 - DNA, 201 bp, Homo sapiens
ggcaggagaatcacttgaacccaggaggcaggggttgcagtgagccaagactgcaacactgtactccatctcaaaaaaaaaaagaaagaaagaaagagagagagagagagagagagagagagagagaaggaaagaaagaaaagaaagaaagaaagaaaagaaagaaaagaaagaaaagaaagaaaagaagaaagaaagaaa

SEQ ID NO: 12345 - DNA, 201 bp, Homo sapiens
gcaggagaatcacttgaacccaggaggcaggggttgcagtgagccaagactgcaacactgtactccatctcaaaaaaaaaaagaaagaaagaaagagagagagagagagagagagagagagagagaaggaaagaaagaaaagaaagaaagaaagaaaagaaagaaaagaaagaaaagaaagaaaagaagaaagaaagaaaa

SEQ ID NO: 12346 - DNA, 201 bp, Homo sapiens
caggagaatcacttgaacccaggaggcaggggttgcagtgagccaagactgcaacactgtactccatctcaaaaaaaaaaagaaagaaagaaagagagagagagagagagagagagagagagagaaggaaagaaagaaaagaaagaaagaaagaaaagaaagaaaagaaagaaaagaaagaaaagaagaaagaaagaaaag

SEQ ID NO: 12347 - DNA, 201 bp, Homo sapiens
aggagaatcacttgaacccaggaggcaggggttgcagtgagccaagactgcaacactgtactccatctcaaaaaaaaaaagaaagaaagaaagagagagagagagagagagagagagagagagaaggaaagaaagaaaagaaagaaagaaagaaaagaaagaaaagaaagaaaagaaagaaaagaagaaagaaagaaaaga

SEQ ID NO: 12348 - DNA, 201 bp, Homo sapiens
ggcaggggttgcagtgagccaagactgcaacactgtactccatctcaaaaaaaaaaagaaagaaagaaagagagagagagagagagagagagagagagagaaggaaagaaagaaaagaaagaaagaaagaaaagaaagaaaagaaagaaaagaaagaaaagaagaaagaaagaaaagaaagaaagaaagaaagaaagaaag

SEQ ID NO: 12349 - DNA, 201 bp, Homo sapiens
caggggttgcagtgagccaagactgcaacactgtactccatctcaaaaaaaaaaagaaagaaagaaagagagagagagagagagagagagagagagagaaggaaagaaagaaaagaaagaaagaaagaaaagaaagaaaagaaagaaaagaaagaaaagaagaaagaaagaaaagaaagaaagaaagaaagaaagaaagaa

SEQ ID NO: 12350 - DNA, 201 bp, Homo sapiens
ggggttgcagtgagccaagactgcaacactgtactccatctcaaaaaaaaaaagaaagaaagaaagagagagagagagagagagagagagagagagaaggaaagaaagaaaagaaagaaagaaagaaaagaaagaaaagaaagaaaagaaagaaaagaagaaagaaagaaaagaaagaaagaaagaaagaaagaaagaaaa

SEQ ID NO: 12351 - DNA, 201 bp, Homo sapiens
gggttgcagtgagccaagactgcaacactgtactccatctcaaaaaaaaaaagaaagaaagaaagagagagagagagagagagagagagagagagaaggaaagaaagaaaagaaagaaagaaagaaaagaaagaaaagaaagaaaagaaagaaaagaagaaagaaagaaaagaaagaaagaaagaaagaaagaaagaaaag

SEQ ID NO: 12352 - DNA, 201 bp, Homo sapiens
ttgcagtgagccaagactgcaacactgtactccatctcaaaaaaaaaaagaaagaaagaaagagagagagagagagagagagagagagagagaaggaaagaaagaaaagaaagaaagaaagaaaagaaagaaaagaaagaaaagaaagaaaagaagaaagaaagaaaagaaagaaagaaagaaagaaagaaagaaaagaaa

SEQ ID NO: 12353 - DNA, 201 bp, Homo sapiens
tgcagtgagccaagactgcaacactgtactccatctcaaaaaaaaaaagaaagaaagaaagagagagagagagagagagagagagagagagaaggaaagaaagaaaagaaagaaagaaagaaaagaaagaaaagaaagaaaagaaagaaaagaagaaagaaagaaaagaaagaaagaaagaaagaaagaaagaaaagaaag

SEQ ID NO: 12354 - DNA, 201 bp, Homo sapiens
agtgagccaagactgcaacactgtactccatctcaaaaaaaaaaagaaagaaagaaagagagagagagagagagagagagagagagagaaggaaagaaagaaaagaaagaaagaaagaaaagaaagaaaagaaagaaaagaaagaaaagaagaaagaaagaaaagaaagaaagaaagaaagaaagaaagaaaagaaagaaa

SEQ ID NO: 12355 - DNA, 201 bp, Homo sapiens
gtgagccaagactgcaacactgtactccatctcaaaaaaaaaaagaaagaaagaaagagagagagagagagagagagagagagagagaaggaaagaaagaaaagaaagaaagaaagaaaagaaagaaaagaaagaaaagaaagaaaagaagaaagaaagaaaagaaagaaagaaagaaagaaagaaagaaaagaaagaaag

SEQ ID NO: 12356 - DNA, 201 bp, Homo sapiens
gccaagactgcaacactgtactccatctcaaaaaaaaaaagaaagaaagaaagagagagagagagagagagagagagagagagaaggaaagaaagaaaagaaagaaagaaagaaaagaaagaaaagaaagaaaagaaagaaaagaagaaagaaagaaaagaaagaaagaaagaaagaaagaaagaaaagaaagaaagaaag

SEQ ID NO: 12357 - DNA, 201 bp, Homo sapiens
ccaagactgcaacactgtactccatctcaaaaaaaaaaagaaagaaagaaagagagagagagagagagagagagagagagagaaggaaagaaagaaaagaaagaaagaaagaaaagaaagaaaagaaagaaaagaaagaaaagaagaaagaaagaaaagaaagaaagaaagaaagaaagaaagaaaagaaagaaagaaaga

SEQ ID NO: 12358 - DNA, 201 bp, Homo sapiens
caagactgcaacactgtactccatctcaaaaaaaaaaagaaagaaagaaagagagagagagagagagagagagagagagagaaggaaagaaagaaaagaaagaaagaaagaaaagaaagaaaagaaagaaaagaaagaaaagaagaaagaaagaaaagaaagaaagaaagaaagaaagaaagaaaagaaagaaagaaagaa

SEQ ID NO: 12359 - DNA, 201 bp, Homo sapiens
agactgcaacactgtactccatctcaaaaaaaaaaagaaagaaagaaagagagagagagagagagagagagagagagagaaggaaagaaagaaaagaaagaaagaaagaaaagaaagaaaagaaagaaaagaaagaaaagaagaaagaaagaaaagaaagaaagaaagaaagaaagaaagaaaagaaagaaagaaagaaag

SEQ ID NO: 12360 - DNA, 201 bp, Homo sapiens
gagagagagagagagagagagaaggaaagaaagaaaagaaagaaagaaagaaaagaaagaaaagaaagaaaagaaagaaaagaagaaagaaagaaaagaaagaaagaaagaaagaaagaaagaaaagaaagaaagaaagaaagaaagaaagaaagaaagaaagaaagaaagaaagaaagaaagaaagaaagaaaatgaggt

SEQ ID NO: 12361 - DNA, 201 bp, Homo sapiens
gagagagagagagagagagaaggaaagaaagaaaagaaagaaagaaagaaaagaaagaaaagaaagaaaagaaagaaaagaagaaagaaagaaaagaaagraagaaagaaagaaagaaagaaaagaaagaaagaaagaaagaaagaaagaaagaaagaaagaaagaaagaaagaaagaaagaaagaaagaaaatgaggtct

SEQ ID NO: 12362 - DNA, 201 bp, Homo sapiens
agagagagagaaggaaagaaagaaaagaaagaaagaaagaaaagaaagaaaagaaagaaaagaaagaaaagaagaaagaaagaaaagaaagaaagaaagaaagaaagaaagaaaagaaagaaagaaagaaagaaagaaagaaagaaagaaagaaagaaagaaagaaagaaagaaagaaagaaaatgaggtcttgccaggtt

SEQ ID NO: 12363 - DNA, 201 bp, Homo sapiens
gagagagagaaggaaagaaagaaaagaaagaaagaaagaaaagaaagaaaagaaagaaaagaaagaaaagaagaaagaaagaaaagaaagaaagaaagaaagaaagaaagaaaagaaagaaagaaagaaagaaagaaagaaagaaagaaagaaagaaagaaagaaagaaagaaagaaagaaaatgaggtcttgccaggttc

SEQ ID NO: 12364 - DNA, 201 bp, Homo sapiens
agagagagaaggaaagaaagaaaagaaagaaagaaagaaaagaaagaaaagaaagaaaagaaagaaaagaagaaagaaagaaaagaaagaaagaaagaaagaaagaaagaaaagaaagaaagaaagaaagaaagaaagaaagaaagaaagaaagaaagaaagaaagaaagaaagaaagaaaatgaggtcttgccaggttcc

SEQ ID NO: 12365 - DNA, 201 bp, Homo sapiens
tgttggccaggctggtctcgaactcctgacctagtgatccgcccgcctcggcctgccaaagtgctggctgggattacaggcgtcagccaccgcgcccggcttttttttttttttttttttttttttacccctggaggagcctgaggtaagggggtcacagtcctccaggctcagaaactgggctctccggacacctgggtc

SEQ ID NO: 12366 - DNA, 201 bp, Homo sapiens
gttggccaggctggtctcgaactcctgacctagtgatccgcccgcctcggcctgccaaagtgctggctgggattacaggcgtcagccaccgcgcccggcttttttttttttttttttttttttttacccctggaggagcctgaggtaagggggtcacagtcctccaggctcagaaactgggctctccggacacctgggtcc

SEQ ID NO: 12367 - DNA, 201 bp, Homo sapiens
ttggccaggctggtctcgaactcctgacctagtgatccgcccgcctcggcctgccaaagtgctggctgggattacaggcgtcagccaccgcgcccggcttttttttttttttttttttttttttacccctggaggagcctgaggtaagggggtcacagtcctccaggctcagaaactgggctctccggacacctgggtccc

SEQ ID NO: 12368 - DNA, 201 bp, Homo sapiens
atgggagcgaaagattttttctgccctctccatctccggagaatggttctgcccaaagccgcggctgccccagcactcgcgggtccctggctgggggcagmccctccccagctgccgcgccggggtttcgggtgccttccctggtgtagaagctgccaacccaacgttgtgcatacggtctggggtggccagtgcattagg

SEQ ID NO: 12369 - DNA, 201 bp, Homo sapiens
ttttggcaggggggccacaaagtgtgttttatttttactattcatataaataattttctataataacctggagcaaaccagagaatttggcagtcccattygcgggtcccctcagagacccacaggccagtggcatctgtgtgaggtgcccaggttcacagagcagcttgtggcttgcatccaccttgcaggttgcttttc

SEQ ID NO: 12370 - DNA, 201 bp, Homo sapiens
aaggggctctctgaggtctctgactctgacacagaaagggacctcaggcctggtggagccgagtggaggcaggaagaaggaagctagggtcccatggggcyacgacaagagggttccacacacacccgactcaccatccggcagcgctgctgcagcttcagcacctgggcctgcagccgagcgacctcctgctgctgccgt

SEQ ID NO: 12371 - DNA, 201 bp, Homo sapiens
ctgggcctgcagccgagcgacctcctgctgctgccgttcatagttttccagcctgagcaccagcacctccgacagctcagccatctgttggctggcctccrctggggagggcagaggacaggtcagccctggctcccctggccttcagggaccagctctggccctcccagatgcctctgtctcccccaccctcggctgctg

SEQ ID NO: 12372 - DNA, 201 bp, Homo sapiens
ctgatgcacgtgcaatggctgctgtgcatgagtgtcacaaggtcatctttcatgtcctgcggctccttaaagaggcagggctcacatggcctgcactcggmaggtgcagctcccagactttggggtttctggctggggagaggagaccctgttccaccccacaaccctgcaggaggccctagcccaccttctgacacccag

SEQ ID NO: 12373 - DNA, 201 bp, Homo sapiens
tccaccatcccacccaccgccccccgtgtttgttttgactgctgctgccactgctgcagagttggagagcctggggtatagaggaggcaggggttgggggyaggggaagcaagcgggcagagatgggaagctgaggcgcagtgtgggggcacagtcccagccctaacccccagcccagcccccaggagaaaagtggatgga

SEQ ID NO: 12374 - DNA, 201 bp, Homo sapiens
gactttgcccccatacccgcaaccaaaaagtgggcaaaacttccccctccgcccgcccacccacccctccatcgcacgcaagcccggtcggccagcgcagrctcagagcgcgcgggacagcgccctcccgcagccccccgcccctctcctggcactgcggtagacccaggagaggggcgctgagggggtgcagatctgccg

SEQ ID NO: 12375 - DNA, 201 bp, Homo sapiens
tattaacatgtgtatcacacatttaacacacagagtacccagagttgagtaactcagagaggtagcttagaattcaggctcacactgtctacggccatacyaccctgaacgcgcccgatcttgtctgatcttggaaactaagcacggtggggcctggttagtactcagatgggagaattcaggctcacagagcatcttcaa

SEQ ID NO: 12376 - DNA, 201 bp, Homo sapiens
ggttagccacagcaataatcttctcaatgatattcttttggcaggggggccacaaagtgtgttttatttttactattcatataaataattttctataatawcctggagcaaaccagagaatttggcagtcccattcgcgggtcccctcagagacccacaggccagtggcatctgtgtgaggtgcccaggttcacagagcag

SEQ ID NO: 12377 - DNA, 201 bp, Homo sapiens
ccggtcggccagcgcaggctcagagcgcgcgggacagcgccctcccgcagccccccgcccctctcctggcactgcggtagacccaggagaggggcgctgarggggtgcagatctgccgcagcaagaggcgcgtggaggtgggtgggcgagcgtgcaggccccagaacctgactcacgggcacaaaccaggggacaagagca

SEQ ID NO: 12378 - DNA, 201 bp, Homo sapiens
cgaatctctgtcgtccaggcaggagtgcaatggtgcaatcttggctcactgtaactgccgcccgagtccaagcgattttcctgcctcagcctcccgagtamttgggattacaggcatgcgccaccacgcccagttaatttttgtatttttagtagagacggggtttcaccatgttggccaggctggtctcaaactcctgac

SEQ ID NO: 12379 - DNA, 201 bp, Homo sapiens
ccgcccgcctcggcctgccaaagtgctggctgggattacaggcgtcagccaccgcgcccggcttttttttttttttttttttttttttacccctggaggarcctgaggtaagggggtcacagtcctccaggctcagaaactgggctctccggacacctgggtccctggcgcctagaatggagacagccaggggaagtacag

SEQ ID NO: 12380 - DNA, 201 bp, Homo sapiens
ttttttttttttttacccctggaggagcctgaggtaagggggtcacagtcctccaggctcagaaactgggctctccggacacctgggtccctggcgcctaraatggagacagccaggggaagtacagcctcagactggcttatcaccccctacccaggaggcagtgcaatggagtctcctgggtcatacaaacagacgcag

SEQ ID NO: 12381 - DNA, 201 bp, Homo sapiens
gggtgagatcctaggactctggactcccaaaccagggctccacatcccctggcacaggtgagcgccaccaggaaccctccaggggcacctgtgggagaggrtggagaccggccaggatgtgagccacagatccccagggagtgagccttggcacagccaggtgcccacttcttccctagagccctcagcccagccccgctc

SEQ ID NO: 12382 - DNA, 201 bp, Homo sapiens
ttacaggcgtcagccaccgcgcccggcttttttttttttttttttttttttttacccctggaggagcctgaggtaagggggtcacagtcctccaggctcaraaactgggctctccggacacctgggtccctggcgcctagaatggagacagccaggggaagtacagcctcagactggcttatcaccccctacccaggaggc

SEQ ID NO: 12383 - DNA, 201 bp, Homo sapiens
gattgcagtagtgccatctcagctcactgcaacctccacctcccaggttcaagcgattctcctgcctcagcccctcaagtagctgggattataggcgggcrccaccatgccaggctaatttttgtactttttagtagaggtggggtttcaccatgttgtctaggctggtcctgaactcctgaccccgtgatccacccgcct

SEQ ID NO: 12384 - DNA, 201 bp, Homo sapiens
ttgggagttttaggcacagtaatgacgtggtcagacttgggtttgttggtttatttatttatttgagaccgaatctctgtcgtccaggcaggagtgcaatrgtgcaatcttggctcactgtaactgccgcccgagtccaagcgattttcctgcctcagcctcccgagtacttgggattacaggcatgcgccaccacgccca

SEQ ID NO: 12385 - DNA, 201 bp, Homo sapiens
catgccaggctaatttttgtactttttagtagaggtggggtttcaccatgttgtctaggctggtcctgaactcctgaccccgtgatccacccgcctcagcytcccaaagtgctgggattctctaggtgtgagccgctgcactcagcctgaatgtattttaaagcagtagatagaataacaaaggaatatgaaaaccatgga

SEQ ID NO: 12386 - DNA, 201 bp, Homo sapiens
gagcccttcgctccctgacctctgtccccagagtcagcaattccctctcatccctgcgtccatgtccaggctctgagcccttccagggacaatttgtgggrttggggatagagacagagggataaatacacattcactgagacctgactaggtgccgtatggattttggatatatttcattttatcatcactggaaggaaa

SEQ ID NO: 12387 - DNA, 201 bp, Homo sapiens
tcctttcccttacacagacacgccatgttctctcttgctcagagcctccgaccttgccattccctgtgcctgcaacgctcttccccaggcacaaatatggkgggctcccctttcctccttagctcttgggtgaaatgcctcttcctgagagacctaccctttctgctcctcacccttcacacatagacccagttattctct

SEQ ID NO: 12388 - DNA, 201 bp, Homo sapiens
atttcacaatctgtagttgttttgtttgccagtttattgtctgcctctcgggcaaaacaggaaactgggagcgtgacaagtccctcctcccttctgtatcmccggtggcaagaataggaggaacccaataaatatttgtaaataattgctcatgagtggctgatgcaggcattgctggtgtctcactccattccatcattg

SEQ ID NO: 12389 - DNA, 201 bp, Homo sapiens
gcttcagtcccacggtttcagactatttatgctctgaacacaagagtactggttaattatgttctcagctctcctcgctgttctaagtgtgcacttgttgmaagtaacttatatttttttatttgaatgtattttatttttttgagacagagtcttgctctgccacccaggctggattgcagtagtgccatctcagctcac

SEQ ID NO: 12390 - DNA, 201 bp, Homo sapiens
tctcagctctcctcgctgttctaagtgtgcacttgttgaaagtaacttatatttttttatttgaatgtattttatttttttgagacagagtcttgctctgycacccaggctggattgcagtagtgccatctcagctcactgcaacctccacctcccaggttcaagcgattctcctgcctcagcccctcaagtagctgggat

SEQ ID NO: 12391 - DNA, 201 bp, Homo sapiens
gccaccatcattgccagaaataccatgtaaaaattggcaatttggccagccacagtggctcacgtctgtcatcccagcactttgggaagccaaggcaggcrgatcacctgaggtcaggagttcgagaccagcctgaccaatacggtgaaaccctgtctctactaaaaatacaaaaattagctgggcatggtgttatgcatc

SEQ ID NO: 12392 - DNA, 201 bp, Homo sapiens
acagtggctcacgtctgtcatcccagcactttgggaagccaaggcaggcagatcacctgaggtcaggagttcgagaccagcctgaccaatacggtgaaacmctgtctctactaaaaatacaaaaattagctgggcatggtgttatgcatctgtaatcccagctactcaggaggctgagacaggagaattgcttgagcccag

SEQ ID NO: 12393 - DNA, 201 bp, Homo sapiens
ctaaaaatacaaaaattagctgggcatggtgttatgcatctgtaatcccagctactcaggaggctgagacaggagaattgcttgagcccaggaggcagagsttgcagtgagctgagatcacgccattgcactccagcctgggagacagggcgagactctgtctcaaaaaaaaaaaggcaatttggagattgcagtatttag

SEQ ID NO: 12394 - DNA, 201 bp, Homo sapiens
ttttttttttttttttttgagacagagtctcactctgttgcccaggctggagtgcagtggcacgatcttagctcactacaagctctgcctcccgggttcaygccattctcctgcctcagcgtcccaagtagctgggattacaggcgcccaccaccacgcctggctaattttttgtatttttagtagaggcggggtttcacc

SEQ ID NO: 12395 - DNA, 201 bp, Homo sapiens
ttctgacacccaggggactgttccaactgtggcccttgctggtgaaggcctttgtccccatagcctgggcagtcccagaaggcctctcttcctcccaggcsgtgggagggtggctggtcctgtcctccagcctgggtcagcccccaggctgctccaccatcccacccaccgccccccgtgtttgttttgactgctgctgcc

SEQ ID NO: 12396 - DNA, 201 bp, Homo sapiens
aggcctttgtccccatagcctgggcagtcccagaaggcctctcttcctcccaggccgtgggagggtggctggtcctgtcctccagcctgggtcagcccccrggctgctccaccatcccacccaccgccccccgtgtttgttttgactgctgctgccactgctgcagagttggagagcctggggtatagaggaggcaggggt

SEQ ID NO: 12397 - DNA, 201 bp, Homo sapiens
cactgtagcgaaaatcatacctgggcgggagatagcgacatcttttgaggggctggaaagtccaaccccccaggcccacccccacccgtctccacacagaycctgatggttcctcctggttctgtcccagccaggggagaggggagctaggtaccagctccaaggcttcaaatacccagcccatccccctggtgggaggga

SEQ ID NO: 12398 - DNA, 201 bp, Homo sapiens
aggctgaggtaggagaatcgcttgaacccaggaggcggaggttgcagtaagccgagatcacgccaacctggacaacaaaacaagactccatctcaaaaaamaaaaaaaaaaattagccaggctcgtgcctgtagtcccaactacttggaaggctgaggcaggagactcgcttgaacccaggagatggaggttgcagtgagc

SEQ ID NO: 12399 - DNA, 201 bp, Homo sapiens
aagctgaggcaggagaatcacttgaacccaggaggcaggggttgcagtgagccaagactgcaacactgtactccatctcaaaaaaaaaaagaaagaaagaragagagagagagagagagagagagagagagagaaggaaagaaagaaaagaaagaaagaaagaaaagaaagaaaagaaagaaaagaaagaaaagaagaaag

SEQ ID NO: 12400 - DNA, 201 bp, Homo sapiens
gagtagaggcagtgcgaccagttaagaggtatcttgggctagaggcagcccgagtggggagggggaaaaagacttaagccattcctaggaggtaaaagcarcagagcttggggactggttcctactccagtagcctggggaccagtggggccattcagggagttgcagaacccagcaggaaggaaggtcagttctggggta

SEQ ID NO: 12401 - DNA, 201 bp, Homo sapiens
gaagagagaggagccatgggttgggagtgggcagggacaggagagggtcctggcatgaggcaggtgtagattggccccctatcctctcctccccacccggktacctcctccttggctgagcccagcagggcttccagcttgctgttctcctccatcaaaacactgttctgtttcaccagggactggccgatgcgagctgca

SEQ ID NO: 12402 - DNA, 201 bp, Homo sapiens
tccatctccggagaatggttctgcccaaagccgcggctgccccagcactcgcgggtccctggctgggggcagcccctccccagctgccgcgccggggtttsgggtgccttccctggtgtagaagctgccaacccaacgttgtgcatacggtctggggtggccagtgcattagggcagcgctgcgtctttcccggttgactg

SEQ ID NO: 12403 - DNA, 201 bp, Homo sapiens
ctgcctggcgctgcaaccctgaccctcgcgctcacaccccagtgctcgcgccactcgacgtcttccatttgattggattaactgttcttcacctccaaccytaattcgctttgccctcctcttgccatgctggcgaacccctgttctccttgggagacgcctcttaaaagtctccctgtagccgggcgcagtggctcacgc

SEQ ID NO: 12404 - DNA, 201 bp, Homo sapiens
cctggcgctgcaaccctgaccctcgcgctcacaccccagtgctcgcgccactcgacgtcttccatttgattggattaactgttcttcacctccaaccttarttcgctttgccctcctcttgccatgctggcgaacccctgttctccttgggagacgcctcttaaaagtctccctgtagccgggcgcagtggctcacgcctg

SEQ ID NO: 12405 - DNA, 201 bp, Homo sapiens
gtctgaggtataaaatctggcaggaagagagaggagccatgggttgggagtgggcagggacaggagagggtcctggcatgaggcaggtgtagattggcccsctatcctctcctccccacccggttacctcctccttggctgagcccagcagggcttccagcttgctgttctcctccatcaaaacactgttctgtttcacca

SEQ ID NO: 12406 - DNA, 201 bp, Homo sapiens
ggtcacagtcctccaggctcagaaactgggctctccggacacctgggtccctggcgcctagaatggagacagccaggggaagtacagcctcagactggctyatcaccccctacccaggaggcagtgcaatggagtctcctgggtcatacaaacagacgcagccactcaccctgcacctgttgcgtgtgcagaggacaggag

SEQ ID NO: 12407 - DNA, 201 bp, Homo sapiens
tagtgatccgcccgcctcggcctgccaaagtgctggctgggattacaggcgtcagccaccgcgcccggcttttttttttttttttttttttttttaccccyggaggagcctgaggtaagggggtcacagtcctccaggctcagaaactgggctctccggacacctgggtccctggcgcctagaatggagacagccagggga

SEQ ID NO: 12408 - DNA, 201 bp, Homo sapiens
aatgttctgtgtcagaaaagccagggactaggattatttctcttttaagaaacgtgaagactcaagccgggcgcagtggctcacatctgtaatcccagcastttgggaggccgaggagggtggatcactttaggtcaggtgctcgagaccagcctggccaacaaggtgaaaccccgtctctactaaaaatacaaaatttag

SEQ ID NO: 12409 - DNA, 201 bp, Homo sapiens
actctgaactgtcccagccctgggtgcctggtctctggcagctcatggctccctcttgcctgccccaaataagagaagacaggcttggaggagacccaccttttttttttttgagatggagtcttgctctgtcgcccaggctggggtgcagtggcgtgatctaggctcactgcaaactctgtctcccaggttcaagcaatt

SEQ ID NO: 12410 - DNA, 201 bp, Homo sapiens
gacaattctcaaaagatgatatgtaaatggccaacaaacatatgaaaaaatgctcaacatctctaattatcagggaaatgcaaatcaaaaccacaatgagwtaccaccttactcctataagaatggccgtaataaaaaaatactggatgctggagtggatgtggtgaaaaggcaacatttttatgctgttggtgagaatgt

SEQ ID NO: 12411 - DNA, 201 bp, Homo sapiens
tggattgctatctttcttagcatcatttatagttattgacattttcttagtgactagagtcacatttacaaggatacatgccattgcagcaagcataggaytggtttggggcaaagctgggtttgccctgacaccaaatggctgccatttgaaatctcttttaaatacttgaaattgctctttatcatttttatgttttct

SEQ ID NO: 12412 - DNA, 201 bp, Homo sapiens
ttaaggaagttcccgatgaggaaatcaggtgcttttgctcagaatctctggactctgttctcaggtagcactccttgtaacaggtgagcagaactctaggstatttgaaataaagacttaatcctagtgatctctatgttcccagcacctaggacattcctgcttccacagtgtgtactcagcaaattcttgtgtatgaat

SEQ ID NO: 12413 - DNA, 201 bp, Homo sapiens
ggtgctatggaccagctttgtgtgcagtaagggaattacatccatgaggtggttctttctgtgggtaggtggttgctaggatacagatagtcacaacagcmtcacggcagctgccttgttcttcagcacatggtgtatcagttgagaaatagtgttttatttcattcactccaacacttttctggttaaaattttaaaagc

SEQ ID NO: 12414 - DNA, 201 bp, Homo sapiens
taaatttcaagccttgtcctttcgtaaatagtcattgcaaagacaaagaaggtgtatttaacaaacttgaattgtttccaggtcacccatttgctgtagcrgtgtttgaggattatgtgtggttctcagattgggctatgccatcagtaatgagagtaaacaagaggactggcaaagatagagtacgtctccaaggcagca

SEQ ID NO: 12415 - DNA, 201 bp, Homo sapiens
tttaggatttttttgtggggaatcacatgagataacctagcatgtaccaaagcatggtgcttagcagagtatgctcaataaatgtcctcctgggctccacrtcttggctaaatctctgatcaagtcatacgatgagatgccgtatttgaacagtgcagtgacacggcacagatccatggagtgtggaatgtgtggatggca

SEQ ID NO: 12416 - DNA, 201 bp, Homo sapiens
gttgaaaaagaaattgttcctgtttggcttctgtacctgcattatttatatgaacttttttggtaataaagggtaaggaagaagtacagcctcccagctgygggagggatcctggggtggcactaagttatcacttttagtagtaaacagtgaaatcagtgatttcagtaccggctaaggcgtggtcagcatcccagtcat

SEQ ID NO: 12417 - DNA, 201 bp, Homo sapiens
tttcagccagggttatgcgattttttttctttttttctaacagcagtgaaactaacctccaaatattcagtggtgtttggtcattgagcttagtggtaaaraagcataaattttggagacagatttcttgcctggattcaaatcccatttctgctgcttgtgaactgtttgtctcattttccttaccctaaaatgaagata

SEQ ID NO: 12418 - DNA, 201 bp, Homo sapiens
cagaaaggtctaggatggaaagattttaaagaaggctaatttccagcaatttgcttgtggtggcatggtccaaaaaatttcactataaaaaagaaatgtgmccttatttagtagttactgactggacaggtcaagtgtaaacgatacacatctgtaaatagagaagtatgctcagaatattccctagtcagtcagtggtct

SEQ ID NO: 12419 - DNA, 201 bp, Homo sapiens
cctctgatttaccaaatcagaatctctagagggtggcatactctccggttatctcaatgtacactagggacattttcaagggggcaagaatatgtttctastgaatcttactgttattggtcatgtctagtgatgttaaataaaatttatgggaggcaactgatttagactgagctcctgcaataggccccaacagaccaa

SEQ ID NO: 12420 - DNA, 201 bp, Homo sapiens
gaggttttggagaagtaatacaattggagaaaaaagtgggcttcgggatgctggggaatctgggctctggctaagtttgcctccgtgagagatgcagctgyagacgttgtagggaggtaagacctcttaagaatcaggaaaagatttagcagtgtcctctgtcaaaacacggccccactccaaataaagcatcttctcttt

SEQ ID NO: 12421 - DNA, 201 bp, Homo sapiens
aagaacgaggaaacaattgttatgagctgtgaggggacagactttacctgaaggtttgctgttgggagggttggggcaagggcaggggctgcttacatccyagcgcttccaacaacaaagtaaaacatttttcattcctgttcctaaaagtgacacaaggtcatctgtggaagggacttgccagacatctctttttcttgg

SEQ ID NO: 12422 - DNA, 201 bp, Homo sapiens
aattgtccccattgtctatttacttcttgcctacaggccagcgctttcctccagaatgctaatattgttcaccatgaaggaagtattgcctagatattagrtgaactaagaactagattcactttgtagagattctttattaccactgaggtggttgtgcacacggccatcccaggcccttcccagatgtcctgtttgctg

SEQ ID NO: 12423 - DNA, 201 bp, Homo sapiens
tggaataatgcttgtcaatatgtctttctttaggagatgttctatttcttaagagcatcttccagagctttcttctcaattctgggaattagcaaatgtayagaaacttcagttgttttagccaaatacaaggcagaaacttctactctcatcacctgttgacctccttgctaagtctggaatctgaattggtgtgagcat

SEQ ID NO: 12424 - DNA, 201 bp, Homo sapiens
gcttgtaaagagctttcaagagtccctaactgaaatggcatgctatatcttttcaagggaaataatactacctttttcccaagggttattctaatatgaaratctgtatttgaaagtataagctgggccaggcgtggtgactcacacttgtaatctcggcactttgggaagccaaggcgggcagatcacttgagtcccaga

SEQ ID NO: 12425 - DNA, 201 bp, Homo sapiens
agtcaggagcttatgtcgttctcgtctcatcacttaattcctgcccgaaacagaatttagagatgatgtctctcatctctaagatgattagagatcatcakgagatcagaagtgacagtttcatctcccctggtcacaagcaagtggcctcagaatttcttccctcccaccaagggaagaggcacagtgacagttgtgtct

SEQ ID NO: 12426 - DNA, 201 bp, Homo sapiens
gtgtttccaacccagcatagtcactgagccagttttaccttcacctctcttctgcatactgcctgtgaataaggccctgtgcatagagcactgtgcatgtmgtcctgttccctacacagcacctagaaaatagttggtgaaccagccaccagagaaggtctccttagcattctgtaaaaccgggaggagggaatggcccta

SEQ ID NO: 12427 - DNA, 201 bp, Homo sapiens
gtcccttgtttgctcctgaagggggcagggatgctatagagtcatgtttagcatttaaattcatccagttttctccatttcttctgctactgttttatctsctcaccgtcatctcctgcctgcctcgccctttcacactaaagccacagcaaactttctaaagtgcaagtataactgccccacattctttaggtcctgtac

SEQ ID NO: 12428 - DNA, 201 bp, Homo sapiens
attactgctgctcaaaagagtaggaacctaaggcaaagagtggtaagataagttactcgagtttagtctataagtagcgacagatgtactaaacaaggaarattccacctttctccttcatggggctaggacgacaatcagcccacattctcccactctgcaactgctgggtgatagtgggccttgctgggacctcatgcc

SEQ ID NO: 12429 - DNA, 201 bp, Homo sapiens
gtgtatttaacaaacttgaattgtttccaggtcacccatttgctgtagcagtgtttgaggattatgtgtggttctcagattgggctatgccatcagtaatragagtaaacaagaggactggcaaagatagagtacgtctccaaggcagcatgctgaagccctcatcactggttgtggttcatccattggcaaaaccaggta

SEQ ID NO: 12430 - DNA, 201 bp, Homo sapiens
agctgcgggagggatcctggggtggcactaagttatcacttttagtagtaaacagtgaaatcagtgatttcagtaccggctaaggcgtggtcagcatcccwgtcatgtgcaaaccagagtaattctgagaccagaagcttgtctgttttttcagccagggttatgcgattttttttctttttttctaacagcagtgaaact

SEQ ID NO: 12431 - DNA, 201 bp, Homo sapiens
ctaagtaaaggctttagtgtaagtctggcatataggaattaataaatgctatctgttattttgattttttatgaactgtaaccttcccccaaaagagtcayatgctctaagcccttttctaccacctcttgagagacaagattcttaggcacaaacttgacattttaattcagtagtccatcaataacattgtaattttta

SEQ ID NO: 12432 - DNA, 201 bp, Homo sapiens
ctcaggaatatattagaatgtctcttttgctgttgtttttttccccccgcactgtactgcaaacaatttgacccattctctgtgggccactcatataactrtctcccagcatgagtgatcacatccccaatcatgtccagctgtctcataaatgcctggggtgaaaatgcgcatagagattggggtggggggagattgagt

SEQ ID NO: 12433 - DNA, 201 bp, Homo sapiens
acaaaataatactagagatgcaatgtgctctgagatatattctcagagtaacggaaagccagaaagtgaaatggtggccatcctgaacatctggtaccaamgcaaccaagtaaaagtaaaagaagggagaatgagggtttaacctctgtgaaatcagcagtttcaacacagagggagaagtcccagggaatgaatgggttt

SEQ ID NO: 12434 - DNA, 201 bp, Homo sapiens
ttggtgtggccagagatcaaggagatcagaggagagctcttgatggggtaaggatgagagaggtaggccccggaatctctcagaaaggtctaggatggaargattttaaagaaggctaatttccagcaatttgcttgtggtggcatggtccaaaaaatttcactataaaaaagaaatgtgcccttatttagtagttactga

SEQ ID NO: 12435 - DNA, 201 bp, Homo sapiens
ggagtgcagtaatccaaccactcactgctcactgcagcctcgaactcctgggctcaaacaatcctcccagctcagcctcccaaatagctgggactaccggsacacaccgccacgcccagctaatttttgtattttttgtagagacagagtttcaccatgtttcccaggctggtctcaaactcttgggctcaagcaatccac

SEQ ID NO: 12436 - DNA, 201 bp, Homo sapiens
cccagagcaaacagacgaaagggagaagtccatgctgcattaacttgtaaatcatagcgctttcaactgacccctgatggattttctatatgtttctaaaragctgagtctggaaatgcagaggttgagagacagctgaatactgagtgtcaaaactatcagcgtttttggccaggcatctctgatgacctctgtttgtgt

SEQ ID NO: 12437 - DNA, 201 bp, Homo sapiens
atggccccaaattactcagaacttggtagcatgtttaaatgagtgttattaatgtgtgtgtgcgtgtgtgtgtatgaaaagttgtagcacacacatatatkagatattatttgcctggcctatgggcagttcttagaatacttatggattcttggattgcttatggtaaatcagtggctccagggatccgtgacctaaaag

SEQ ID NO: 12438 - DNA, 201 bp, Homo sapiens
actttgagcaagaacacaatggatgactccttgatttgaattgagttttggggtcattcttaaggtccaggatctatactggtagctgtaggtatagtccyagttaagttgtaaatggctccaagaaaacatgttccatgttcagcccatctagtgggaagtgtttctgtaaatttaagttgatctgaggattgtcctggg

SEQ ID NO: 12439 - DNA, 201 bp, Homo sapiens
cagtgaaactaacctccaaatattcagtggtgtttggtcattgagcttagtggtaaagaagcataaattttggagacagatttcttgcctggattcaaatmccatttctgctgcttgtgaactgtttgtctcattttccttaccctaaaatgaagataattgtaccctcttccgaggactcttgtcagtattgcgttaatg

SEQ ID NO: 12440 - DNA, 201 bp, Homo sapiens
tcaaatcccatttctgctgcttgtgaactgtttgtctcattttccttaccctaaaatgaagataattgtaccctcttccgaggactcttgtcagtattgcrttaatgtattcattttcagtgctggctgtgcattagaatcactaatgtctgggtggccaccccgggcagtctggatcagagtctcttctgggagtggaat

SEQ ID NO: 12441 - DNA, 201 bp, Homo sapiens
atagttctacaacattaaaaattatagtcaaaataatttaaaaatacataactcatatttttgtaatcagaagaaatgtttattaaaaatacaagaacatrtcaacttgatttgagtaagtacctttgtgaaactgtggctctggtgtttgtctttttcttataccaactgataaaaaatttcattcattgcaaattaact

SEQ ID NO: 12442 - DNA, 201 bp, Homo sapiens
gcaaaagaggaaaagcctgatattattggtgaaacacttgttcttcctgcttcctgttgtggtaaaatattgctaaaataatacatgaaaaaccacatgamaacaaattaaaatgtgttcctttgtaaacaaatactgctgaaaactgtacagaaagaatcaatgaaaatgtgatgaagtaagtactaagcaattatactg

SEQ ID NO: 12443 - DNA, 201 bp, Homo sapiens
ctgaaaactgtacagaaagaatcaatgaaaatgtgatgaagtaagtactaagcaattatactgttgaatggaagtaaaggtgtttctaatatatcacagcrtatggttgttttctagaaagtaatagccaaaatttactgggaactcactatgtgtcagacaagattctaagcactttacatgaattactttacttattct

SEQ ID NO: 12444 - DNA, 201 bp, Homo sapiens
ttaagtcatgtgctgaaggccacactgtcaatagtattggagccaataaagagtcaacatgagtactccgtctccaatgccagtaatcttagccactatcrtaattacctcaacaatgaaatgctcagagaactgtaattcttttctatgagagagtaagggaaaaatgcaacagaaaagaaattttctcagtgaaagttc

SEQ ID NO: 12445 - DNA, 201 bp, Homo sapiens
tgttttcaagaatgctttatgggtggcactgcaggtggttctgtaagcttcccctttgtaccacattaaaaggcacatggggctagttcttattctttttygtgatgttcaaaattaattagcatttcagaggtcaccagcctggtccagccactgcaagttccccatcagccttttgcttaattgttttagaagctattg

SEQ ID NO: 12446 - DNA, 201 bp, Homo sapiens
ttgctcagctctgagaaggagtgttctctgaggtcagcagcagcattctcagtgctggctttggcctattttgaagctaaagaacagcagaagattaaggwgattaaagaaaatataaccctcaatcctctgtgttttgccaccacctaaaatgaccttttaaagtgtttagtgtctgaattcaggtcacgtcatcagcac

SEQ ID NO: 12447 - DNA, 201 bp, Homo sapiens
tgagaggagtgggaggttgagtttggggcataggaagtatggattagtaatttgtgttttacatatgtcttttgagggaggagattcaatgacctcttaaycatgaaaatcagggaacgtaagttttatagctcatgtgagaatggcaatctaactaataacattatttacataaacattttatataagttttgtgtgtaa

SEQ ID NO: 12448 - DNA, 201 bp, Homo sapiens
ttgttatcagggaaactcaaaacctgtctgaatataagcaataagcattctcggagcatctgctatggaaataagactttctccgaagtcacatgggagayacagaggagcctaagatgtgctccatcttttcagtcggttcttagtttagctggggagataaggtatatttccccagcaaaataattaatgcaaattctt

SEQ ID NO: 12449 - DNA, 201 bp, Homo sapiens
atgagggtttaacctctgtgaaatcagcagtttcaacacagagggagaagtcccagggaatgaatgggtttctatgcttgggggtaggcattttgtgtccyagaaatatctctttttatcaggataatccatgggaaacaggtttttaaaaatctgttgatgtgctttgggaggccaaggtgggcagatcacaaggtcagg

SEQ ID NO: 12450 - DNA, 201 bp, Homo sapiens
cggagcttgcagtgagcggagatcgcaccactgcactccagcctgggtggcagagcgagactccgtctcaaaaaaaaaaaaaaaaaaaaaatctgttgatktgtttatctgtatgatatggttatcagttatcaatagtatggccattttacatccaaggtgagcatattttctttcattcattcatttgttcatctaatc

SEQ ID NO: 12451 - DNA, 201 bp, Homo sapiens
accctgccagattccattgggttatttaatgtaaagattagcaagtaatatttcagtaccattggccctgtttatctacagcttccacatctgaggattcraccaaccttggatcaaaaatattcaaaaattaaattaaattaaaaataagaatacagtcataaaaaataatacaaataaaaaccaataacttataactgt

SEQ ID NO: 12452 - DNA, 201 bp, Homo sapiens
ccccatcctttcactttaggtcactgcccttcaagcagtgcaatttgactttgaaacattttatttgtttgtgttactaagtaacactttaacaagatgtmtgtggcaaaaaaaaaaaaggaaaatatttcaaaactccacattaggacttttaaggagatgctttacccaacttttgtggtctgcaaactactttgttga

SEQ ID NO: 12453 - DNA, 201 bp, Homo sapiens
ttacaaatcagttcacagatatgaaagcagagagactgagatctattaagttagtgacttgaccaaaggtttttgaaaattatgaccaaataattaattamtgtgaaaataagacgttctggaaaacttcattaacattaggaatatagtgtgtttagcaatttatttggcatacactgtgctaagtgctggggataccaa

SEQ ID NO: 12454 - DNA, 201 bp, Homo sapiens
agctgattgtcctggtgaaaaacccctcatctttccatacctggattgtgttctgtgttgtcctagcttgtgaagtcttacttccacctaagtcaggcttrggggtctaatttctgtttcagagtgagatttcacatcaacaaagtgtctatggctaaaagacaatgtgaaaactccacattaggattttagagtataatc

SEQ ID NO: 12455 - DNA, 201 bp, Homo sapiens
tgtttcagagtgagatttcacatcaacaaagtgtctatggctaaaagacaatgtgaaaactccacattaggattttagagtataatctaaaattcttaacrtggccttttgggccctgtatgaaacaacctttagacacctccccagcctcaacaagggctcaccagccctcttgccttcggctttctgtggcctgcttcc

SEQ ID NO: 12456 - DNA, 201 bp, Homo sapiens
tatttaaattatcacaatatctttctttgtcatccttatttaaatatgtatcaaagagagtttgatcaaatatttgactaaatatcttgatcaaaggggtwttttttaaggtcactttttattctagtccttagaaccatcatgaaaaatagacctggcagaaattgtcactgctgttttagagaagaggaatgtgaacac

SEQ ID NO: 12457 - DNA, 201 bp, Homo sapiens
ctggaggctcgaagtcctagatcaaggtgctggctgatttggttttgggtgaaggatctcttcctggcttgcagatggccacctgctcactgtgttctcayatggccttccctctttgatgtggagagagagagaaagggagacagagagcaagagaacgctctagtttctcttcctcttttgttttcttcttcctcttct

SEQ ID NO: 12458 - DNA, 201 bp, Homo sapiens
atttacatgctataatttcctaacctatgataaattgggtatttgcaatagttattgctagttttaatgttaagaatctaattggttttgcctgttcattrtttctgatcatcccaaataatgaaattacaaaaataaatgtccgaatgtattaggtcatggttgttttcctccatgatactttagactataaaaatcatt

SEQ ID NO: 12459 - DNA, 201 bp, Homo sapiens
ggatctgataacatccatttattaaatgattgatgaactctttaacacactgcttttctttctgtcattaaatcctgatgaaaatatcatatttctctgayaatgttttaaacatgagttgctacaaatgacaaactggagataagactcaaattgaaggaccttgaacctaaagcaatatttaaaatattaccagagttc

SEQ ID NO: 12460 - DNA, 201 bp, Homo sapiens
agataagactcaaattgaaggaccttgaacctaaagcaatatttaaaatattaccagagttcacagtaatctggatcataaccttgtttttaaattgtatmtttaataaaaatgtggtttaattaactattcaacccttgcctcctcctgccctgatgacctcaccttatcttttattaattccttaataacaagtctcta

SEQ ID NO: 12461 - DNA, 201 bp, Homo sapiens
tggattaaaaagtcattctatttttagctcttgagaaatcaccatactttttccctagaggattgcaaatttacattcccaccagcaatgtataagagttrtttttttcttcacatccatgccaacatctgctgttttttaactttttaataatagtcattctgatgggtgtaagaagatatctcattgtgattttgattt

SEQ ID NO: 12462 - DNA, 201 bp, Homo sapiens
aaggttttatgaaagcctcagatgggaaaacgtgtctggctctggatggtcatcagctgttggcaggtaatataataaattatgtggcaaattacctaacrttggctcagaaatacagctgtacatcaatctttatgcttttgctgattttgaatattttggatgttaaaagttctcctgtttttaggaatgctaagaatt

SEQ ID NO: 12463 - DNA, 201 bp, Homo sapiens
ctgtcgacacttggacctttccatacccctgaggagtgagcaaatggaaaaggcatttcacattttatagtagctcttctttctgaattgctctttgtcartttgactagatgatgagtcaggaaataagaatcacatttgactaaagagcttcttgaaaaaagtgctggctatacccagtactaataaggtaataacatt

SEQ ID NO: 12464 - DNA, 201 bp, Homo sapiens
gctatacccagtactaataaggtaataacattctgggcttatcttagaatcagtggctccttgggggaactcttctgaaatagctattgatataccctctrtttagatacactgcatttctctccctaaaagctatagctccctaaaagcaagctgtagacttgcattaatggcatccttttcatcttcaaacccacttgt

SEQ ID NO: 12465 - DNA, 201 bp, Homo sapiens
aaggcaggcaatttagacaccggcagtggaagcttctgtcgacacttggacctttccatacccctgaggagtgagcaaatggaaaaggcatttcacatttyatagtagctcttctttctgaattgctctttgtcagtttgactagatgatgagtcaggaaataagaatcacatttgactaaagagcttcttgaaaaaagtg

SEQ ID NO: 12466 - DNA, 201 bp, Homo sapiens
aggagctggtttagaatgcctatctttgcatttcagaaagaggagaaaggagtatttttgtttgaaaagtaaaggtgttataacaaactcccttattttgmacatattttaggaaatctctgattggaaggagtgatttaaatgggaaacgttccaaaataatcactaaggagaacatctctcaaccacgaggaattgctg

SEQ ID NO: 12467 - DNA, 201 bp, Homo sapiens
catccaatggccaagtaggtatttgtaaaaataaggcactgctctgcagaggtcatgtgacagttcatggttgatatgctagtgtccaaaaccagaaaccmagaaaatccatgcaatttgttcaaatcttcagcatgaattcctcatgcttttaatgtcttgattttctattcttgtataataattttattgttaatatgc

SEQ ID NO: 12468 - DNA, 201 bp, Homo sapiens
ttcgaatttagttgcaggtgtgcctatctccaaagtcaagctcttaacaccctgtacaacctaaagactagtgccatttgtatatattccacattagtttwaaaaaaaaatcagaaatgcctgtgttctcttttgtagatatactttgcccatacagccctgaagtggatagagagagctaatatggatggttcccagcga

SEQ ID NO: 12469 - DNA, 201 bp, Homo sapiens
cagcagatgggaatggtttatgccctagatcatgaccctgtggaaaataaggtatggttttgttacttgaacagatgtggacatgctttaaggacagagtrgaggattttatcctaacaaatgacctggcctacttgaaaatcctctgctaagttctgaatgattaggcacagaacaagttaaatatagatattggagtaa

SEQ ID NO: 12470 - DNA, 201 bp, Homo sapiens
tagtgctgtggttgtctggaactgtgtccctgaaaaaaaattcatgaaaatcttttgtttagaaagatggaaagttaactgcttatggttttgtatttttraaatggaaaaaaagcaaatcacattgtaaatatgaataatatgagtaataacaatataactagtaaccaggcttttaaagactatttctattcttaatta

SEQ ID NO: 12471 - DNA, 201 bp, Homo sapiens
tgtaatcccaacactttgggaggtcaaggcaggaggatcacctggcaatattagcaactgattgcaataaatttttgcaaacccgatttaacactaatctygaccttgttctttattaattagaacttgtttcctgtccacgcaatgtgtctgaatgcagccatgactgtgttctgacatcagaaggtcccttatgtttct

SEQ ID NO: 12472 - DNA, 201 bp, Homo sapiens
cttgtttcctgtccacgcaatgtgtctgaatgcagccatgactgtgttctgacatcagaaggtcccttatgtttctgtcctgaaggctcagtgcttgagaragatgggaaaacatgtagcggtgagtttatttgctttatttaccttttgtttgtttgaaaacatacatttgctcagtgacatctaaaaattgatcttgtt

SEQ ID NO: 12473 - DNA, 201 bp, Homo sapiens
accctttgctagagtatggaaaacagactttccatgatcaattacagcatatacaagtgtgagataccctgcgttgtgatgacttattagtgatagcacartttattttcaaaaatagccatttgaatgtattgtgctgttgtcattgtgcagatgttaatgaatgtgctttttggaatcatggctgtactcttgggtgta

SEQ ID NO: 12474 - DNA, 201 bp, Homo sapiens; identical to SEQ ID NO: 1402

SEQ ID NO: 12475 - DNA, 201 bp, Homo sapiens
atcttctattcaacatggaaaatgaagacaatttggatagccaacaaacacactggaaaggacatggttagaattaacctccattcatcatttgtaccacwtggtgaactgaaagtagtgcatccacttgcacaacccaaggcagaagatgacacttgggagcctggtgagtcatcgttgaccttgcgcagggcctgacac

SEQ ID NO: 12476 - DNA, 201 bp, Homo sapiens
tcatttgtaccacttggtgaactgaaagtagtgcatccacttgcacaacccaaggcagaagatgacacttgggagcctggtgagtcatcgttgaccttgcrcagggcctgacacatagttcccacccattcacctgcttgagccagacaatgaggcgttgtaggggaaaaaaaatttttttcttcaaccctcatatattct

SEQ ID NO: 12477 - DNA, 201 bp, Homo sapiens
catttaaggcactatacattcatttttgggtctatgtaatgtgtttgccctcaggtttatattttggtcttcagaggtggctggaagcctttatagagcasatctcgatggtgtgggagtgaaggctctgttggagacatcagagaaaataacagctgtgtcattggatgtgcttgataagcggctgttttggattcagta

SEQ ID NO: 12478 - DNA, 201 bp, Homo sapiens
cttgtaatgtctacaatagggcagtgtttacttgttgaataaattttcattcaaaatagtcaaacttgccctgtgaaggagctgctgaaacattgagagarttggccatttaaggcactatacattcatttttgggtctatgtaatgtgtttgccctcaggtttatattttggtcttcagaggtggctggaagcctttata

SEQ ID NO: 12479 - DNA, 201 bp, Homo sapiens
gacaggatccccccataaatattcctaactatcatggttttctgctatagaggcataattccctttctaacttgaaatcacttgtaatgtctacaataggrcagtgtttacttgttgaataaattttcattcaaaatagtcaaacttgccctgtgaaggagctgctgaaacattgagagagttggccatttaaggcactat

SEQ ID NO: 12480 - DNA, 201 bp, Homo sapiens
tgtttctggaatggcaataaattggataaatgaagaagttatttggtcaaatcaacaggaaggaatcattacagtaacagatatgaaaggaaataattccyacattcttttaagtgctttaaaatatcctgcaaatgtagcagttgatccagtagaaaggtaaattctgctgtattcagacattgaaatatatttacaaat

SEQ ID NO: 12481 - DNA, 201 bp, Homo sapiens
gtatctttaggattgacacagaaggaaccaattatgagcaattggtggtggatgctggtgtctcagtgatcatggattttcattataatgagaaaagaatytattgggtggatttagaaagacaacttttgcaaagagtttttctgaatgggtcaaggcaagaggtaaaatacccttacctacagtgtttgagctgttttt

SEQ ID NO: 12482 - DNA, 201 bp, Homo sapiens
cttttgcaaagagtttttctgaatgggtcaaggcaagaggtaaaatacccttacctacagtgtttgagctgtttttgtacaggctgacaaatataatataytgaattcttaatgtatagataaatgaaaattatataacagttcaaatgcgtgtctgccaaatataggcatttatttaatctacatctgtggtgtatattc

SEQ ID NO: 12483 - DNA, 201 bp, Homo sapiens
aagacaacttttgcaaagagtttttctgaatgggtcaaggcaagaggtaaaatacccttacctacagtgtttgagctgtttttgtacaggctgacaaatawaatatactgaattcttaatgtatagataaatgaaaattatataacagttcaaatgcgtgtctgccaaatataggcatttatttaatctacatctgtggtg

SEQ ID NO: 12484 - DNA, 201 bp, Homo sapiens
gtctctcagcaccgcagcactggagctgtcctgaaggtactctcgcaggaaatgggaattctacttgtgtgggtaagtactccaatgaaaaggtgctccakgtctccgggaaactgcccccacatccctgttggttcaatctggtatacttgggcatttaacaaagtttgtctttgggtatgtatagttgcttaatttttg

SEQ ID NO: 12485 - DNA, 201 bp, Homo sapiens
tggtgaatggttatttttacttagatcctgactgtttttcaatgaaaagtctcatttaaccacacacacacacacaaacaaaataactaaattgtataagstatgtgaatagctgggctgtattgaaatgccatggacctgatttgcactggagttctatcttatatgaggttaccacgttcactcaaaactctagtcaca

SEQ ID NO: 12486 - DNA, 201 bp, Homo sapiens
ccagggatccgtgacctaaaagctgagattccataattagaatagattcttcagttaacatattggtgtgcctagttgctttaagacaaagtaacacaagrctcctcactgaatgttgaatctctctttagatagaaagactaacttcacagggcctttcttctgactttcactttccataggatgaacatcgtaaagcca

SEQ ID NO: 12487 - DNA, 201 bp, Homo sapiens
ctcaaattttggctttatcacaggactcagaagctgctatcgaaaaacccaaagaatccttatgaggagtcgagcagagatgtgaggagtcgcaggcctgstgacactgaggatgggatgtcctcttgccctcaaccttgggtaatgtgaccaaagcagatgaagcaaggaattggcttgatattaacccctattcatttt

SEQ ID NO: 12488 - DNA, 201 bp, Homo sapiens
tcctgattaggacgatgctgggcttgagaatttgaaatggtccaagttttcttaatttaatagcatctggaataaatccttttttattactcacaatccartaaagatgggaacatgggtatctctcttcaactgtgcaactaatctcactatttgtaatgtcaatttgtggggctgctggataagttttgcagggctagg

SEQ ID NO: 12489 - DNA, 201 bp, Homo sapiens
aatacagagggaggctatacctgcatgtgtgctggacgcctgtctgaaccaggactgatttgccctggtaggttggtgggtggtctacagtgaaggggagsgacttggctcggggatattctataccctaatctctatttgcattagagattctaaaaatcattcagttcaggcaggctgcagagctggctttcctgatta

SEQ ID NO: 12490 - DNA, 201 bp, Homo sapiens
ccaaaggctgtccaactataaaaccctctttttctgtaccccacttttctctcccgtactctgtcttttctgacagatattgatgagtgccaactgggggwgcacagctgtggagagaatgccagctgcacaaatacagagggaggctatacctgcatgtgtgctggacgcctgtctgaaccaggactgatttgccctggt

SEQ ID NO: 12491 - DNA, 201 bp, Homo sapiens
ggactgaataagaattgaatatacgattatgcttattctttccaactagtcccatttatatcaggattgcctaaatattgcactagttcataattttgccmacagatatagatgaatgtgagatgggtgtcccagtgtgcccccctgcctcctccaagtgcatcaacaccgaaggtggttatgtctgccggtgctcagaag

SEQ ID NO: 12492 - DNA, 201 bp, Homo sapiens
ggcgtgcctgatgttggcaacagcacctgtaaaggactgaataagaattgaatatacgattatgcttattctttccaactagtcccatttatatcaggatwgcctaaatattgcactagttcataattttgcccacagatatagatgaatgtgagatgggtgtcccagtgtgcccccctgcctcctccaagtgcatcaaca

SEQ ID NO: 12493 - DNA, 201 bp, Homo sapiens
gaagattaaagtccgttttcttctctaaggtctagaaataactgcacgggattcttgctatttgtagatcaagatgactgtgctcctgtgggatgcagcaygtatgctcggtgtatttcagagggagaggatgccacatgtcagtgtttgaaaggatttgctggggatggaaaactatgttctggtaagagaaaagggcaa

SEQ ID NO: 12494 - DNA, 201 bp, Homo sapiens
tttgctggggatggaaaactatgttctggtaagagaaaagggcaaattcacatatttggacaatactgaaccagaaacattttttctgctctttctgactyaaaaactccagaaggatttatgtaatcagcagatttgaataagttatttgatgttagctaaaaaaaaaaattgaatgacatgcatagaaaatgagacata

SEQ ID NO: 12495 - DNA, 201 bp, Homo sapiens
taacctgtcccagaacttgggaaaggaagtggtggactgttctgtagaaccagaagattaaagtccgttttcttctctaaggtctagaaataactgcacgrgattcttgctatttgtagatcaagatgactgtgctcctgtgggatgcagcatgtatgctcggtgtatttcagagggagaggatgccacatgtcagtgttt

SEQ ID NO: 12496 - DNA, 201 bp, Homo sapiens
ggatagcagggtgaggtttactaagttaccaagaccctgacagtttctctgaatcctcttactgtaagaatgagtctgaactcacaaccaatgaatagtcrtaaacataaatgaaatcaaactttttttttgaaacagaaaagctaaatttaattgcatctattgaccttcaataggtggtgaagttgatctaaagaacca

SEQ ID NO: 12497 - DNA, 201 bp, Homo sapiens
ctcttttgaaaccatatgattccagtccaactattagccttgatttctaactgatgttcttttcatgagaataactgattattgtgtgatctttgaaaatktaatagcagcactaaattataaatccttaaaaaacacacatacacatgcaaccaaaaccaacaaaaggctgaaagaaacagaaaatatctagtcaattta

SEQ ID NO: 12498 - DNA, 201 bp, Homo sapiens
tgtcttggcctccccaggctcaagcaatcctcccacctcagcctcctaagtagctgagaccacaggcatgcactaccatgcccagctagttttttattttrtgtagagatggagactccctatgttacccaggctggtcttgaactcttgggtgcaagccatcctcccacttcagcctctcaaagtgctggagttacaaac

SEQ ID NO: 12499 - DNA, 201 bp, Homo sapiens
catcatgggaatgaaggagaaacacaatctgtgtatgactattaaaaaatcaaaagcatttgctgctgtcatgagcaacttgttggctcagagctatgttrggaggcctggggctgctgagctcagtcccccacagccgtcataactgtcgttgacagcaactgctgctgtagatatcagtgggagtgggagagagctgaa

SEQ ID NO: 12500 - DNA, 201 bp, Homo sapiens
tcagtctacatggtatttcattcaggttttgagtagcaggtttaattcatctcattaattcatcatcatgggaatgaaggagaaacacaatctgtgtatgwctattaaaaaatcaaaagcatttgctgctgtcatgagcaacttgttggctcagagctatgttgggaggcctggggctgctgagctcagtcccccacagcc

SEQ ID NO: 12501 - DNA, 201 bp, Homo sapiens
tgcactccagcctgagtgacagactgagaccttttctctaaagcatgagaaagaacatgagttctagccttactctcccaccagttggctatctaatcttsagcaattcctttaacctatgcagacttctgctccccactcagtacaaggggtttggattagatgatctctaagatcccttcagtctttatcagtctttat

SEQ ID NO: 12502 - DNA, 201 bp, Homo sapiens
tgcctagttaaattcatacttatactgaaagttcaaatttaaattcaaaattaaatttaactgggttctttattttatctgacaatcctagatattttccraaaagcacagaggtttgggaaattcaagatgtttcataaatcatccacttcagtaattgatcttggaacactagagggcagtcttgaaacaggctacaca

SEQ ID NO: 12503 - DNA, 201 bp, Homo sapiens
cctatccttatcactcttcctggaacgtccaggtagggcttttgacagagggttgcattcctagaggcaattaagctgcctatctgccccaggacagtggygttattgtggagtctcacagatgcactgctctaggggctactgctttgaggatggggatccatctccatgctaaatctccccacccccacccctagtgaa

SEQ ID NO: 12504 - DNA, 201 bp, Homo sapiens
tcctgtgttagtttgctaagaataatagcctccagctccatccatgttcctacaaaagacatgatctcattcctttttatggttgcatagtattccatggkgtgtatgtgccatattttctttatccagtctgtcattgatgggcatttaggttgattccgtgtctttgccattgcgaacagtgctgctgtgatcattgac

SEQ ID NO: 12505 - DNA, 201 bp, Homo sapiens
aataaatttttcaagtattctaatcttattagtttaaaacatgtgatttcttggaaggactcccttgtaagaaaatcaacaggaagtatttcatcacaaastataactttgtttttttgtgggtttttttttaacttttattttaggttcaggggtatatgtaaaggtttgttacacaggtaaacttgtgtcactggggtt

SEQ ID NO: 12506 - DNA, 201 bp, Homo sapiens
tgtagataaaaatttaaccacatttatgggtactacacaaccactcaagtggcaactgtcttgtgttctggaaaattcaacatatcagccaagatgtactyatcagagatcctgctatagcctagtgtagtggttaagagcacaggctctggaatcagattatacaggttcaaatccaagttagtgtctaaataacaccag

SEQ ID NO: 12507 - DNA, 201 bp, Homo sapiens
tccccgccccatatatatatgtagttataatacttcgaaccttgtctggcacataaaaagtgctatgtaaaattttatccttattattattaagagtagtwgagtttcttggtcaagcatacttctttgtctttgctttggaaaagctctctctttctctcaaggtgatagtttattgaaattatatcaggaactcataaa

SEQ ID NO: 12508 - DNA, 201 bp, Homo sapiens
atggggtgtgctcaccctgcctgcatggttggcacggagtcctcaaactccatgaaagcagtgggcttgctcctctattctctctcccccagctcactctyactctctctccccgccccatatatatatgtagttataatacttcgaaccttgtctggcacataaaaagtgctatgtaaaattttatccttattattatta

SEQ ID NO: 12509 - DNA, 201 bp, Homo sapiens
ggctctggtttctcacactgttactaactcatctccttccagtatcgagcacgcaatggggtgtgctcaccctgcctgcatggttggcacggagtcctcaractccatgaaagcagtgggcttgctcctctattctctctcccccagctcactcttactctctctccccgccccatatatatatgtagttataatacttcg

SEQ ID NO: 12510 - DNA, 201 bp, Homo sapiens
cgggaaacaatgtgggtgcatgagcagagggaagacaggatataattggggtgacacacatgtcaagatttaaagagttgtgcgacctgctcaaactgacrtatttccattcttggtgaacagtcaagtttgtgcccttgtgttattactgccctagtcagcttcaagcccctttggaggctgtttactcctctgcctttc

SEQ ID NO: 12511 - DNA, 201 bp, Homo sapiens
ctcaaactgtacttctgtgtataagtgaatgaatatgcctcattttaaactagcagaacatttcatggaagcttcagcttttactctgacaagaggagtarttaacacctggctaattgcttggaaattagggaaacagatggttgattttttgtttgtctgtttgaaactcttaagccacaaagaaaaaaatccttcctt

SEQ ID NO: 12512 - DNA, 201 bp, Homo sapiens
ctattaatgttttgttgttttaaaaattatttttatgaatgtaatggtattttctaaatgtggcttggtttcgcctataatcatcgaacattttttatacrtgacaaaatgccatagtgaaaaacccaataatagttctacaacattaaaaattatagtcaaaataatttaaaaatacataactcatatttttgtaatcag

SEQ ID NO: 12513 - DNA, 201 bp, Homo sapiens
gggtcttctggtgtttttctcccttcctctgaagtgcataattattctgtttactggaagattttcaacacaaaggaaattaacttctccttggtgtgcarggaaattgcaaaggttattgtcattaatgttaatttacccactatatcttttagattcaagcaacattgtttagaatggtcaatgctctaagtggatcaa

SEQ ID NO: 12514 - DNA, 201 bp, Homo sapiens
tgtttagaatggtcaatgctctaagtggatcaaaaggcttattattttttggaagacaaatttgaaaaacctgctggaacttttatctctcctggttactstaatgaatcatggcaaagatttcatgtaagtgggaaaaaatgaggtatttgaagaaaaatgttcatctaggatttcaatccattaaaaagcacacaatca

SEQ ID NO: 12515 - DNA, 201 bp, Homo sapiens
gtaatagccaaaatttactgggaactcactatgtgtcagacaagattctaagcactttacatgaattactttacttattctttttaacaatctctgaggtwagtattactattattcccattttatttttgcagatgaagaaaccaagacacggagaggttaagtcatgtgctgaaggccacactgtcaatagtattggag

SEQ ID NO: 12516 - DNA, 201 bp, Homo sapiens
gctgtgtgtccccactcaaattccatcttgaattgtaatccccaggtgttgagggagagacctggtgggaagtgattggatcatgggggcggtttccccartggtgttctcctaatagtgagtgagttctcacgagatctgatggttttataaggggcttcaccgctttgctgtctcttctcgctcctgccgcatgtggag

SEQ ID NO: 12517 - DNA, 201 bp, Homo sapiens
ccggtaccatgctgttttggttactgtagccttgtagtgtattttgaagtaaggtagtgtgatgcctccagctttgttctttttgcttaggattttcttgkgtataggggctcttttttggttagatatgaactttaaagtagttttttccaattctgtgaagaaagtcaggggtagcttgatggggatagcattgaattt

SEQ ID NO: 12518 - DNA, 201 bp, Homo sapiens
tttgctcctgtgattatgatggaggttctgtccacattagtaaacatccaacacagtaagttttactcttggtataaaataaaacaattgtcatttgaagkccacaagataaattaattttacttttgtcaatggaactggtatagtggtttaggccatagattttgaatccaaaagacttgagtttggccgggcgcggcg

SEQ ID NO: 12519 - DNA, 201 bp, Homo sapiens
gcatggtggctcacacttgtaatctccacattttggaaggctgaggtgggaggattgcttgaggccaggagtttgagaccagcctggacaacataacaagrctcggtctctacaaaaacgaaagaaagaaagaaagaaaaacaaatagaaatggattaacatgtacattttatatatacatgggagaaatccggggaatga

SEQ ID NO: 12520 - DNA, 201 bp, Homo sapiens
ttttctgcatctctttctttttaattgtttgaagctcaacaatccttcccattttggagtggcatattctgggatcttacagggccatcttcaatttttcmcactgtctcacccccagtttctaatccaacaccgaatccattccattctaccttctaaatacatttcaaatgtccacttctcttctctattgccactgcc

SEQ ID NO: 12521 - DNA, 201 bp, Homo sapiens
taatccaacaccgaatccattccattctaccttctaaatacatttcaaatgtccacttctcttctctattgccactgccatagtctaagcagacaggtackttttgtttggcctactatagtagccactcaactgatccttctgttttctgaatctgatccattcactcccctacataaaatccttcaaaagcttttcttt

SEQ ID NO: 12522 - DNA, 201 bp, Homo sapiens
gatcacttgaacccaggaggcagaggccacagtgagccaagatcgttccactgcactccagactgggtgacagattgagactctgtctcaaattaaaattaaaaaaaaaaagttgttaggtttttatgaaataccacaaggggcctacagaaaaaaagttgtcaggtttttaaaaatttgttataatcgttaggctgctca

SEQ ID NO: 12523 - DNA, 201 bp, Homo sapiens
agtattcttcctaccataaatgtattgtctcttcagagcccctcactactcagcttctgtgacaggaagttcaaataggataactgaaagcatgaatttcrgaagaaaatctacaatgattcactaaagtgcagccccaaacaatgtggcaagtaatagaattggctggaaagcctctgccagctgcagagccacagacaa

SEQ ID NO: 12524 - DNA, 201 bp, Homo sapiens
gtgtgcatcattactctctaaaggtgacacaacccatgtcatttttctgttttatttcctatgcagcagcccacaggactcttgaatctattatttgtagytcagacctcttttttttttttttgagctctagacaaatttttttaaaaaaaggactcaggcataatgagcgtcaagctgcaaagatctgctatagagtta

SEQ ID NO: 12525 - DNA, 201 bp, Homo sapiens
gctattaaaaggccaactcaaaccttcctggatttttgttgttgttaacttgtacagtttgtaaaaataaaagttaaacacaatactgctttttaaaaagaaatttaaagtggatgaattttgtctccaatatttacaagtttctaattttagtcatttacttttaaaatttaggccattttatttttaattttgcttaaa

SEQ ID NO: 12526 - DNA, 201 bp, Homo sapiens
tgctttcattaaattatcaactgacccatatctttaaaaaaatatatatatatatacattttaaatttttataggtttaggggtacaagtacagttgtctyacatggatagattgtgtagtggtgaagtctgggcttttaatttacctatcacctgaatagtgaacattgttcccataggtagtatttcacctgttacccc

SEQ ID NO: 12527 - DNA, 201 bp, Homo sapiens
catccaaggtgagcatattttctttcattcattcatttgttcatctaatcataccttcatttctttattatttgagtatttatttactgaatagttgcaaygcaccagatactgtgctttatatccatgacactattaaatccccaaaggtaagttttgttatctccaatttaaagattaagaaaattgataattggagag

SEQ ID NO: 12528 - DNA, 201 bp, Homo sapiens
cataacagaagaacaggcgagcaagatttcattgcctttttgcagtacaaaatgctaattcaagaatattttactcaagcctatttactcatgactatttkattagtcatatattgcaatttttaaaccaatttcttttttaatctaatgatctgagctttaattcaacatttcttttcgaagatgctttacatagacaag

SEQ ID NO: 12529 - DNA, 201 bp, Homo sapiens
gaaagaaggtgggggactaatgcaggcaaatgtgttggtggagatgggaatgtggggagactcttatacaattacctcaaattttgaaaaatccttacaasaacttgtgaatttgatctaccccttattactgctgctcaaaagagtaggaacctaaggcaaagagtggtaagataagttactcgagtttagtctataagt

SEQ ID NO: 12530 - DNA, 201 bp, Homo sapiens
agaacttgtgaatttgatctaccccttattactgctgctcaaaagagtaggaacctaaggcaaagagtggtaagataagttactcgagtttagtctataartagcgacagatgtactaaacaaggaaaattccacctttctccttcatggggctaggacgacaatcagcccacattctcccactctgcaactgctgggtga

SEQ ID NO: 12531 - DNA, 201 bp, Homo sapiens
ggctgtgaacatatttgcaaaaagaggcttggaactgcttggtgttcgtgtcgtgaaggttttatgaaagcctcagatgggaaaacgtgtctggctctggwtggtcatcagctgttggcaggtaatataataaattatgtggcaaattacctaacgttggctcagaaatacagctgtacatcaatctttatgcttttgctg

SEQ ID NO: 12532 - DNA, 201 bp, Homo sapiens
tgcatattagtctggacataaacaggacaccttgagagtctttgggtgtgagtctttgttctgtgaagaaacaaagtaacttggaaacaaaagtaaaacayaggacaacatatttgaatgtatttccatccacccctgatatttttggtatttggtccaccttgctgtttttctattagcctgaaaagttgatagtaattg

SEQ ID NO: 12533 - DNA, 201 bp, Homo sapiens
ctttcactttaggtcactgcccttcaagcagtgcaatttgactttgaaacattttatttgtttgtgttactaagtaacactttaacaagatgtatgtggcaaaaaaaaaaaaggaaaatatttcaaaactccacattaggacttttaaggagatgctttacccaacttttgtggtctgcaaactactttgttgatgtacgt

SEQ ID NO: 12534 - DNA, 201 bp, Homo sapiens
tcagcatttgcttgtctttaaaggattttatttctccttcacttatgaagcttagtttgtctggatatgaaattttgggttgaaaattcttttctttaagratgttgaatattggcccccactctcttctggctgtaggatttctgcagagagatctgctgttagtctgatgggcttccctttgtgggtaactcgaccttt

SEQ ID NO: 12535 - DNA, 201 bp, Homo sapiens
aaattttgggttgaaaattcttttctttaagaatgttgaatattggcccccactctcttctggctgtaggatttctgcagagagatctgctgttagtctgrtgggcttccctttgtgggtaactcgacctttctctctggctgcccttaacattttttccttcatttcaaccttggtgaatctgaaaattatgtgtcttgg

SEQ ID NO: 12536 - DNA, 201 bp, Homo sapiens
agcctggtgagtcatcgttgaccttgcgcagggcctgacacatagttcccacccattcacctgcttgagccagacaatgaggcgttgtaggggaaaaaaawtttttttcttcaaccctcatatattcttagtcataatagacccctgtaagaaaagacagattaacaagaaaaaaacaaatagaaggccaggcatggtggc

SEQ ID NO: 12537 - DNA, 201 bp, Homo sapiens
taatctccacattttggaaggctgaggtgggaggattgcttgaggccaggagtttgagaccagcctggacaacataacaaggctcggtctctacaaaaacraaagaaagaaagaaagaaaaacaaatagaaatggattaacatgtacattttatatatacatgggagaaatccggggaatgaatagctctcaaagaggtgg

SEQ ID NO: 12538 - DNA, 201 bp, Homo sapiens
ctgcactccagactgggtgacagattgagactctgtctcaaattaaaattaaaaaaaaaaagttgttaggtttttatgaaataccacaaggggcctacagaaaaaaagttgtcaggtttttaaaaatttgttataatcgttaggctgctcaatgtacctcataaatgatgtgacactaacatctcacctttatgtaaaagt

SEQ ID NO: 12539 - DNA, 201 bp, Homo sapiens
aatcccagcaccttgggaggccaaggcgggtggatcacttgaggtcaggagttcaaggccagcctggccaacatggtgaaaccctgtctctactaaaaaawaaaataaaataaaataaaataaaataaaataaaataaaataaaatgcaaaaattaactgggtgtggtggtgtctgcctgtaatcccagctatttgggagg

SEQ ID NO: 12540 - DNA, 201 bp, Homo sapiens
atcattatttatccatggccttctggtagttaagtgcttcagtttgcacagatcatggagtcaaaaccctatttctctctctctttttacatttttctttratgttttttttcaatttcagaaacttaaaatctttctctttctctcttacttctccccggctgtccgaaaacaggcacagaatgaatctcacattttttg

SEQ ID NO: 12541 - DNA, 201 bp, Homo sapiens
tatctatctatctctctatctatctatagcaataacaatagcaatagcaatatgtgccagatacatggctaaggatatatgtatatttatatctatatachtctatctatctatctatctatctatctatctacctacctacctacctacctaataagattgatattattatccttattttaccgatgaggaaactaagat

SEQ ID NO: 12542 - DNA, 201 bp, Homo sapiens
acgccgaagacttacccagaatgatgtaggtgaggctttgggatgggcgattttttcatcttgactgagtgtttatgagtgttaaatacaaaatatgtttmcacacacacacataccacttagccgtatgggtgaatatggaatagagacagacttctccagggaatcatgagctgcaaagcttaccttaacattggaata

SEQ ID NO: 12543 - DNA, 201 bp, Homo sapiens
ctccactaaaaatacaaaaattagctgggcatggtggtgagtgcctgtaatccctctgccactcaggaggctgaggtgaaaagatcacttgagcctgggakgttgaggctgtagtgagccgtgattgtgcaactgtactccagcctgggtgacggagtgaaaccgtctcaaaaaatacaaaaaccaaaaaatacatcaccc

SEQ ID NO: 12544 - DNA, 201 bp, Homo sapiens
cttgggctcaagcaatccacctgcccgggcctctcaaagtgctggaattgcaggcatgagccactgcactcaattttcttaattttcttaatatttcttartatttcttttattttcttaatatttcttttctcacacacatttcaactccccaaatttcagtagcaaaatagttgccagatttaacaaataaaaatatag

SEQ ID NO: 12545 - DNA, 201 bp, Homo sapiens
ctcaagcaatccacctgcccgggcctctcaaagtgctggaattgcaggcatgagccactgcactcaattttcttaattttcttaatatttcttaatatttyttttattttcttaatatttcttttctcacacacatttcaactccccaaatttcagtagcaaaatagttgccagatttaacaaataaaaatataggatgcc

SEQ ID NO: 12546 - DNA, 201 bp, Homo sapiens
gctcagctgacatcagttgacacaggttaagtgcagagtacatgctaggggcagctgactatgccaggggaaaagaaaagaaatacacctaaaatctgaaytcagaccaggcacagtggctcacacctgtaatccgagcactttgggaggccaaggtgggcagatcatttgaggtcaggagtttgagaccagcctgtctct

SEQ ID NO: 12547 - DNA, 201 bp, Homo sapiens
aaaaagcaaagctgagtcattccacttttcaaaaagagaaactgttgggagaggaatcgtatctccatatttcttctttcagccccaatccaagggttgtrgctggaactttccatcagttcttcctttctttttcctctctaagcctttgccttgctctgtcacagtgaagtcagccagagcagggctgttaaactctgt

SEQ ID NO: 12548 - DNA, 201 bp, Homo sapiens
tgaaaattaacctaaatttcaatttcaacctccttcactttctccccactcttactgtttctgaggctctgacacaactccggagttttagtaacaggtgyattgcaactttaagaactgccaaatatgataatgggtaaataagccacactgtcctctcatattaaatgaattttttgccaaggggaaatgggagcttga

SEQ ID NO: 12549 - DNA, 201 bp, Homo sapiens
gacttgaaaagagactttaacaggtctggtcatggccagtgattgtgagttatactataggttgtcctcctcccctctccacaattcttaaagaggacttyagtaaaagttagacattgatctcacttgtgctcaggtgaaatggtacatgagtgacaggtaggggggaactacttccaggagcactgtggcctcacattg

SEQ ID NO: 12550 - DNA, 201 bp, Homo sapiens
ttgagcccaggagttcaaggctgcagtgagctaggattgtgctactgcactccagcctgggcaacagagtgagacactgtctttttttttttttttttttyccgagacggagtctctctctgtcgcccaagctggagtgcagtggcgcgatctcgtctcactgcaagctccacctctcgggttcacgccattctcctgcct

SEQ ID NO: 12551 - DNA, 201 bp, Homo sapiens
gagagagacaccgtctcaaaaaaaaaaaaaaaaaagacatgtccaaaagtagatgcaaaactcagtagacagatcaggatagtgatttctgaattttgccgtgtgtgtgtgtgtgtgtgtgtgtgtgtgtgtgtgtgtgtgtgaaacatttggaaaaacttttctaatgctttaatgttggtaaattcattttagtctagt

SEQ ID NO: 12552 - DNA, 201 bp, Homo sapiens
agagagacaccgtctcaaaaaaaaaaaaaaaaaagacatgtccaaaagtagatgcaaaactcagtagacagatcaggatagtgatttctgaattttgccgtgtgtgtgtgtgtgtgtgtgtgtgtgtgtgtgtgtgtgtgtgaaacatttggaaaaacttttctaatgctttaatgttggtaaattcattttagtctagta

SEQ ID NO: 12553 - DNA, 201 bp, Homo sapiens
tccaaaagtagatgcaaaactcagtagacagatcaggatagtgatttctgaattttgccgtgtgtgtgtgtgtgtgtgtgtgtgtgtgtgtgtgtgtgtgwgaaacatttggaaaaacttttctaatgctttaatgttggtaaattcattttagtctagtaatggtagactttaaataaaattgagcataatttgtgttga

SEQ ID NO: 12554 - DNA, 201 bp, Homo sapiens
atgtggtaaggaatattaaaatgtttaaagagccttttctttctctttttttttttttacatgaaaacctcccatttagtcatatatatatatatataaatttttttttttttttttgagacggagtctcgctctgttgcccaggctggagtgtagtggcatgatcttggctcactgcaagctccaccacccgggttcaca

SEQ ID NO: 12555 - DNA, 201 bp, Homo sapiens
ctaaatatgcagttatgtcatctgcaaacagagacaatttgacacatacataaatgtggtctcttaggaagtgtctgttcatatccttcgtccactttttkatggggttgtttggttttttcttgtaaatttgtttaagttctttgtatattctagatattagtcctttgtcagatgggtagattgcaaatattttctccc

SEQ ID NO: 12556 - DNA, 201 bp, Homo sapiens
accatgctgttttggttactgtagccttgtagtgtattttgaagtaaggtagtgtgatgcctccagctttgttctttttgcttaggattttcttgggtatrggggctcttttttggttagatatgaactttaaagtagttttttccaattctgtgaagaaagtcaggggtagcttgatggggatagcattgaatttataaa

SEQ ID NO: 12557 - DNA, 201 bp, Homo sapiens
acgtccctttttcctaattgaataccctttatttcttcctcttgcctgattgccctggccagaacttccaatactatgttgaataggagtggtgagagagsgcatccttgtcttataccagtgttcaaagggaatgcttcctgttttcgcccattcagtatgatattgattgtgggtttgtcataagtagcttttattatt

SEQ ID NO: 12558 - DNA, 201 bp, Homo sapiens
aatcgtgtggtttttgtcgttggttctgtttatgtgatggattatgtttattgatttgcgtatgttgaaccagtcttgcatcccaggggtgaagccaactyggtcgtggtggataagctttttgatgtgttgctggatccggtttgccagtgttttattgaggattttcatgtcaatgttcatcagggatattggcctaaa

SEQ ID NO: 12559 - DNA, 201 bp, Homo sapiens
cacatgagatgggcctcctgaaaccagcacactgatggtcttgactctttatccaatttgccagtctgtgtcttttaattggggcatttagcccatttacrtttaaggttaatattgttatatgtgaatttgatcctgtcattatggtgctagctggtttcttcatagcgtccatggtctttaccatttgacatgtttttg

SEQ ID NO: 12560 - DNA, 201 bp, Homo sapiens; identical to SEQ ID NO: 1404

SEQ ID NO: 12561 - DNA, 201 bp, Homo sapiens
gggtgaaagagtgaaactccatctcaaaaaaaaaaaaaaaaattaacaaatggttgactcgcccccatcctttgatgaaaaataattatattttggatgaygtagcatcattactaagcaattgtttttgtaggttgttcctcacccgataatggtggatgtagccagctctgcgttcctcttagcccagtatcctgggaa

SEQ ID NO: 12562 - DNA, 201 bp, Homo sapiens
acacacacacacacacaaacacacacacaccctctacctcacagaaccttggaaagagtgaaacactgtctggaaagcattttgagttctgcagaaaagamtgccttaaacatctaaagttatgttcctagttatcttcatatttcttctctcccacacaagtacttaaattttagtagcaaaagcagttagttgtccctg

SEQ ID NO: 12563 - DNA, 201 bp, Homo sapiens
cacacataaacatatgtcccaatagtcccttccagctattgctgtccactcacacttataaccattcagagctatctccttgctattaatgtctaactttyttactgacctaccagcagggtttcccccacccagctgtgtcccttcaggatctaaggaactattaaataagaaaaaaaatttttgtccattcctgttcca

SEQ ID NO: 12564 - DNA, 201 bp, Homo sapiens
atctgttgatggtgtggcggtggcaatgattagtaagaggtgctgagcacagtaaatacataacccaggagaactaggtgccctgtgtttcaatgaggaartttcatcggaaaagttagaattttatgacaagcacacataaacatatgtcccaatagtcccttccagctattgctgtccactcacacttataaccattca

SEQ ID NO: 12565 - DNA, 201 bp, Homo sapiens
tcctgaagtgtgatctgcccaccttggcctcccaaagtgctgggattacaggcatgagccaccacgcccggctggaatataaacttattaaatatctctgyaaatccttcccagttgggtagctctgtcctatgattttgctatctgggcaactgtagatgatgaattagctgcgattgattttcatcatcagtcatcagc

SEQ ID NO: 12566 - DNA, 201 bp, Homo sapiens
gcaattctcctgcctcagcctcatgagtagctgggactataggcatgtgccaccacgcctggctaactttttgtatttttagtagagatggggtttcaccrtgttagccaggatggtctagatctcctgaagtgtgatctgcccaccttggcctcccaaagtgctgggattacaggcatgagccaccacgcccggctggaa

SEQ ID NO: 12567 - DNA, 201 bp, Homo sapiens
ttctctatgtccttctgaggcatcctaattactccacagagcttcacactgcatgctgtagtccaaagtacattgcagctcccctccttctttcctgacayccagtttgtgaccagtcatgtacttggtggctggtcattcattagctcatactcatactctctgttgttgctgttaatcaacctcagcaagctcttgatg

SEQ ID NO: 12568 - DNA, 201 bp, Homo sapiens
ctccctttaagaagtgcccaggccagggaaagttacttattcggacatgaaagtatacaatctactaatattagtgtttcagtatgtgtgaatcaagaagwtgtataaccctaagacttgcatcatttagctatggtgttggttatttaacgctgtctctttctgtaagtaagcagcttttaaaagcaaatacctggagag

SEQ ID NO: 12569 - DNA, 201 bp, Homo sapiens
atatacatgtagtcctccataattaataaaatactttcacatctgtaattattattcacaaagcctaattctcaaagtgtttcattttctttaaaattatrttttattacattcttacaaatatagcctgggctctggtttacataaaatgatgttgacagtgtaggaaaaataaacggtgctttgagggaatggaattac

SEQ ID NO: 12570 - DNA, 201 bp, Homo sapiens
gccaacaaaaacagctcctctgctaatgaaaggagctaatgaaatatcaactccaattgaattttctatatttttccttcttcaatgtgcttattatcatracctcctcctcagatttctttctggaaagaacataggcttcttgttttggaaaactcactctaaattcccttctcatacctatgttgccatgaaacccca

SEQ ID NO: 12571 - DNA, 201 bp, Homo sapiens
ttcattttgattattttgttgctggagtgtctactataaaatcttggttattttgaaaccactggaaaagaatcgtcctaaaaagataaatatttagttcrtataattttaaattattagtttaaacacataaaattctgttattcttcacggaaatattagtaaaatatggattgctatctttcttagcatcatttatag

SEQ ID NO: 12572 - DNA, 201 bp, Homo sapiens
acctatgttgccatgaaaccccaaatactgaattcagtacaactttattacctaatttgaagaaggcctggatatttaaggtacacttaaaaattgaatawgaaaactacaataaatagtatagtattttatatggatcattactttcccctgataatgaaaaaattcagcattttcaaaaatttgcttcagtgcttattg

SEQ ID NO: 12573 - DNA, 201 bp, Homo sapiens
gaagtttcaaaacaagcaacagacctttcaaatttgagtctatttgcttctagcaattttataatttacatttgcaaatgcttttaaaaattataaataarttcatatagggttccttgaacacaccagatagtgctttaaaactaaagttctttgagggcacataaacagaaacatggctatgggactttgggactatgc

SEQ ID NO: 12574 - DNA, 201 bp, Homo sapiens
tctgctcccacaagagaaatcttctcgctcaagtagctaagcaaatcaaatgcaattacccaatgtctgcattcacatgccacctgaatcctacttagatmatttaactttctttaatttatcggcaagtttggagggctttttaaaaaatctcttctgtactaagatgagcaagcttaccagtgaatagacagatgataa

SEQ ID NO: 12575 - DNA, 201 bp, Homo sapiens
aggttgagttttgtttcacaggccagaggacattgtttcacaggcctttgtgtcgtgagcctttggaaaggtttagagaaacttttagccaacaaaaacarctcctctgctaatgaaaggagctaatgaaatatcaactccaattgaattttctatatttttccttcttcaatgtgcttattatcataacctcctcctcag

SEQ ID NO: 12576 - DNA, 201 bp, Homo sapiens
gcatgtgccaccacgcctggctaactttttgtatttttagtagagatggggtttcaccgtgttagccaggatggtctagatctcctgaagtgtgatctgcycaccttggcctcccaaagtgctgggattacaggcatgagccaccacgcccggctggaatataaacttattaaatatctctgtaaatccttcccagttggg

SEQ ID NO: 12577 - DNA, 201 bp, Homo sapiens
tctctatgtccttctgaggcatcctaattactccacagagcttcacactgcatgctgtagtccaaagtacattgcagctcccctccttctttcctgacacycagtttgtgaccagtcatgtacttggtggctggtcattcattagctcatactcatactctctgttgttgctgttaatcaacctcagcaagctcttgatgt

SEQ ID NO: 12578 - DNA, 201 bp, Homo sapiens
tagtgtcatcagcccaatgaatggcatcactctctaccgcatctcccaaagcggaaaccgaggagttgcctgttccttcatcttcctcactctcatcccaygaaatcagtctctgcatcccaacaattctactccttatgatctaaccactctgcccttcctgcaggtttctctctccagcatcctcctgactagtatccc

SEQ ID NO: 12579 - DNA, 201 bp, Homo sapiens
tccacaattaataaaatactttcacatctataatttcatttttttcccataataatcctctgatacaggcaggggagatcctgtgagatgtccagagaagygaagctggtggggtcaggactggaaaccaggcctctggctttctgtctagtgccctttccctttttcccaagatgtctacgtgattctacaactgcagtg

SEQ ID NO: 12580 - DNA, 201 bp, Homo sapiens
caggactggaaaccaggcctctggctttctgtctagtgccctttccctttttcccaagatgtctacgtgattctacaactgcagtggagcatgggccctcrctatgtgtctgcatagcggggcttgtattgtagcaaagatctgggaataataatttgagtgaattctcttagacatttatgctggcacctatttcaaact

SEQ ID NO: 12581 - DNA, 201 bp, Homo sapiens
aacagggtcaaaatatttcagaacctttacaggattctgaaattgaaacagcatttcaatttttcctgcttccgtctaagaccttttagttttcaccgtcrtcttctaggtcattatgctgaaggctctggtcataggtaagacccaaggagtccatttccaaaatgataatatctgtaattttagttctaatttacataa

SEQ ID NO: 12582 - DNA, 201 bp, Homo sapiens
atagcggggcttgtattgtagcaaagatctgggaataataatttgagtgaattctcttagacatttatgctggcacctatttcaaactctcataatcttayagttctcccagcctcttgtagcatttcttttttttcttttttttttttttatactttaagttctacagtacatgtgcacaacgtgcaggtttgttacata

SEQ ID NO: 12583 - DNA, 201 bp, Homo sapiens
actgcatggtttaattttgtctccatccttccagacattaaaacatagccaatatttagcagttcccgccattcaccatgagcacctccacagcccccaamtcctctctcccagttctgcccaggatatttatggtgagtagcgagttatctcctctttggcagtcatccctgctttcctgtgtggaggaattgcccacat

SEQ ID NO: 12584 - DNA, 201 bp, Homo sapiens
ccagtgatgatgagcattttttcatgtgtctgttggcttgtgatttttgcacattgattttgtatcctgagagtttgctgaagttgcctatcagcttaagragattttgggctaagacgatggggttttctaaatatgcagttatgtcatctgcaaacagagacaatttgacacatacataaatgtggtctcttaggaagt

SEQ ID NO: 12585 - DNA, 201 bp, Homo sapiens
ttattatcataacctcctcctcagatttctttctggaaagaacataggcttcttgttttggaaaactcactctaaattcccttctcatacctatgttgccmtgaaaccccaaatactgaattcagtacaactttattacctaatttgaagaaggcctggatatttaaggtacacttaaaaattgaatatgaaaactacaat

SEQ ID NO: 12586 - DNA, 201 bp, Homo sapiens
tttattaagtcagatcaccattttatgattaagatagattatttgcatgattatttcttgctatttgtaaggtaccccagtagctctcaggtggggggcartttttccctgagggaacaattggcagtgtctggaaacatttttggttgtcacaagtaggtgaggtaggaaggtggagacgatacaggcatctagtgggta

SEQ ID NO: 12587 - DNA, 201 bp, Homo sapiens
ttagccgggcgtggtggcgagcacctgtagtcccagctattcgggaggctgaggcaggagaatggcgagaacccgggaggcggagcttgcagtgagccgakatcgtgccactgcactccagcctgggcgacagagcgagactccgtctcaagaaaaagacttgagttcaagctccagatttaccgtctgttagatgagtga

SEQ ID NO: 12588 - DNA, 201 bp, Homo sapiens
gagttcaagctccagatttaccgtctgttagatgagtgactttgagtaggttctataacttctcttatcctcagtttcctttaacgtgaggataatcatartatcagtctcttgggattattgtgaagggaaagtaaatgaatacaaacaaaaataattaacagagtatttggcacataataagttctcacatgttgacca

SEQ ID NO: 12589 - DNA, 201 bp, Homo sapiens
actgttcagtttgagaagttttttgaggaagttgaggcagtcattattgagaactcattaatgatgaagacaataaacaaatgaagcaaaaatatagccaygtttttatagacatttcataaaactaacatatattttatgtgcatgtttatatttatgcaaatgcataaatataaacacacacacatagaattttacgta

SEQ ID NO: 12590 - DNA, 201 bp, Homo sapiens
tgaggtgggaggatcacttgagcttgggaagcagaggttgcagtgagctgagatcgtggcattgcactccagcctgggtgacagagccagactctatctcrgggaaaacaaaagcataaaatgtgacagaatagaaatggcttttatcatcatttaattgacttattttaccctttgctagagtatggaaaacagactttc

SEQ ID NO: 12591 - DNA, 201 bp, Homo sapiens
ctgtgtataataacagagctgtacatggttgttctcaggagggtaaacgatgatcaaaatggcagatgtcaaccactctcgggtccactaaggatgccaartcttctcatatttccccacattcacaagggacctctaattttaacagtgtttgattaatagcaccatggtaccgactgcagaggcaaggcgttcaggaga

SEQ ID NO: 12592 - DNA, 201 bp, Homo sapiens
actggttccttatcccccgaatcattaagtgctcagtgaaaatgagagggtgtgggatagcagggtgaggtttactaagttaccaagaccctgacagtttytctgaatcctcttactgtaagaatgagtctgaactcacaaccaatgaatagtcgtaaacataaatgaaatcaaactttttttttgaaacagaaaagctaa

SEQ ID NO: 12593 - DNA, 201 bp, Homo sapiens
tgagagggtgtgggatagcagggtgaggtttactaagttaccaagaccctgacagtttctctgaatcctcttactgtaagaatgagtctgaactcacaacyaatgaatagtcgtaaacataaatgaaatcaaactttttttttgaaacagaaaagctaaatttaattgcatctattgaccttcaataggtggtgaagttga

SEQ ID NO: 12594 - DNA, 201 bp, Homo sapiens
tttcagagggagaggatgccacatgtcagtgtttgaaaggatttgctggggatggaaaactatgttctggtaagagaaaagggcaaattcacatatttggwcaatactgaaccagaaacattttttctgctctttctgactcaaaaactccagaaggatttatgtaatcagcagatttgaataagttatttgatgttagct

SEQ ID NO: 12595 - DNA, 201 bp, Homo sapiens
acttctttgtctttgctttggaaaagctctctctttctctcaaggtgatagtttattgaaattatatcaggaactcataaaagagtcagtttgggccatcygggatagcaattcaatgtgttaaatatttaattggcccctattaagaataaggccacagtactggaaaccctgagaaatatcaggatgaggaaggtagtc

SEQ ID NO: 12596 - DNA, 201 bp, Homo sapiens
tgcaatgatgggtttatcatcgttgtgctggagggagaataatgtggcactggtgtttaggcatggcgcggaggaaacatgggatccaggaatgagtaagkctgttcttgcagtaatgtaaaattgagaggaagagaggccctaaatgttagggtggcagtagctgagaaagaaaaaatggtgggtagttgggaaagaaag

SEQ ID NO: 12597 - DNA, 201 bp, Homo sapiens
cagtgactctgaattcacatggcgacttaggactgggtgttcttttacctgcctccaatatgctttatgtatcagataatactgagcccaaaggaagaacrgctggtttcatagtgaatgactaaggtctagctaggaaagtgaaactattgtcccttctagtagttcttctgtcactaaaagatttatgtcacaaactat

SEQ ID NO: 12598 - DNA, 201 bp, Homo sapiens
gtatggccttgcactagaaatcatgtccgcatgacaaaaatagtgaaaaattgctcatgaatactagtaaaaatgactcagtccttatagaattctgtttkcatattcatatttacatgctataatttcctaacctatgataaattgggtatttgcaatagttattgctagttttaatgttaagaatctaattggttttgc

SEQ ID NO: 12599 - DNA, 201 bp, Homo sapiens
gctgtaggtatagtcccagttaagttgtaaatggctccaagaaaacatgttccatgttcagcccatctagtgggaagtgtttctgtaaatttaagttgatstgaggattgtcctggggatttcagagtattcaggtcttatcaggggcatgaccttagccagacgcctggctgtctgtgaagtccagccaagccacttgtg

SEQ ID NO: 12600 - DNA, 201 bp, Homo sapiens
gaacataggcttcttgttttggaaaactcactctaaattcccttctcatacctatgttgccatgaaaccccaaatactgaattcagtacaactttattacstaatttgaagaaggcctggatatttaaggtacacttaaaaattgaatatgaaaactacaataaatagtatagtattttatatggatcattactttcccct

SEQ ID NO: 12601 - DNA, 201 bp, Homo sapiens
atctcacttgtgctcaggtgaaatggtacatgagtgacaggtaggggggaactacttccaggagcactgtggcctcacattggtgtggccagagatcaagragatcagaggagagctcttgatggggtaaggatgagagaggtaggccccggaatctctcagaaaggtctaggatggaaagattttaaagaaggctaattt

SEQ ID NO: 12602 - DNA, 201 bp, Homo sapiens
acatcaatcaatacatgcaagatatacattagtttgatcaggaaacgagggacaactcaaagagtagggtaaggtggggttaggttccaggtcacagaaastttttcaaagattttctgattggcaattaattaaaagacttatcatctaaggacctggaatcagtagaaaggaatgtctgggttaagataaggggttgtg

SEQ ID NO: 12603 - DNA, 201 bp, Homo sapiens
agatctaaaaaggtgccagactcttagttaattctctcctgggtcgggggaaaggcctagaaatgaatggggattacctgcagaatgtagattttcccaaygagagacagctttgcaggaccatttcaaaacatgtcaaagaaatatattttgggataaaatattttgatttctttcagggtctgctatttgtcgtgtgat

SEQ ID NO: 12604 - DNA, 201 bp, Homo sapiens
tgtagcagtgtttgaggattatgtgtggttctcagattgggctatgccatcagtaatgagagtaaacaagaggactggcaaagatagagtacgtctccaasgcagcatgctgaagccctcatcactggttgtggttcatccattggcaaaaccaggtacatactggagatgttacacagtctttccttggctggaatctgc

SEQ ID NO: 12605 - DNA, 201 bp, Homo sapiens
tggagtgtctactataaaatcttggttattttgaaaccactggaaaagaatcgtcctaaaaagataaatatttagttcatataattttaaattattagttwaaacacataaaattctgttattcttcacggaaatattagtaaaatatggattgctatctttcttagcatcatttatagttattgacattttcttagtgac

SEQ ID NO: 12606 - DNA, 201 bp, Homo sapiens
tcaagttttaagaacagcattttcatgtaaaaacttgatttgtgttttttccagactgaatacttttcctccctaactctcatcgtctcattgcgcgcaaygcctgattgagcttctgtttgactaaatatcacctactatgtaaaaaatgagcatattggcctcttttctagcatctaataaaggcttaatacactgtac

SEQ ID NO: 12607 - DNA, 201 bp, Homo sapiens
ataatgaaactttgagcaatacagtaaacataggcaaaaggtttgaacagatgtattacaaaagaggatatatgaatgatcaattaacacaaaaaaagatrgtcaataccattagtccttaggaaaaggcaaattaaaattgcaatgtgttacgtcacatgtacaaaaacggttaacatttaaaagactaacaataccaaa

SEQ ID NO: 12608 - DNA, 201 bp, Homo sapiens
agatgtctattaggtctgcttggtccagagctgagttcaagtcttgaatatccttgttaattttctttctcgttggtctaatattgacagtggggtgttaytgtctcccacttttattgtgtgggagtctaagtctctttgtaggtctctaagaacttgctttatgaatctgggtgctcctgtattgggtgtacatataat

SEQ ID NO: 12609 - DNA, 201 bp, Homo sapiens
tctgatgggtgtaagaagatatctcattgtgattttgattttcatttctctgatgactagtgatgttaagcattttttcatatgtttgtaggctgcttgtrtgtcttcttttgaaaaatgtctgtttatgtcctttgcccactttttaatggggttatttgtttttatcttctcgggttgtttgagttccttatagattct

SEQ ID NO: 12610 - DNA, 201 bp, Homo sapiens
taaagagccttttctttctctttttttttttttacatgaaaacctcccatttagtcatatatatatatatataaatttttttttttttttttgagacggartctcgctctgttgcccaggctggagtgtagtggcatgatcttggctcactgcaagctccaccacccgggttcacaccattctcctgcctcagcctcccga

SEQ ID NO: 12611 - DNA, 201 bp, Homo sapiens
ggggagtgcttgacttcatgggtttccctgccaactccaacctgtccatgcatcccattgcatcggagtgccgatcagtgactttgttctaatcctccaamtccccttcctgtaccttattttcccagctcttcttgcaattatgtaaggttcaatttctataataaattacttttattacatagtactcaatgatttgct

SEQ ID NO: 12612 - DNA, 201 bp, Homo sapiens
caataccttctggttagttttcatttactgtttaaaatctagaaagatagaaatttgctggtctaattcaacaaaatttgtgaataatcgagggatgtaaytaaaaagtaaattttgtgattttgtaaatacagccaatgatgcatttatttcatctgatgtagacataattgtgaaaaattatttttgtttaaaaaagct

SEQ ID NO: 12613 - DNA, 201 bp, Homo sapiens
aacttagccaggcatgttggcccatgccagtggtcccagctactgaggaggctgaggcagaaggatcacttgaaccaggaggaggaggctgcagtgagccraaatcaagccactgcccttcctgggtgatggagtgagaccctgtctcaaaaagcaaaacaaaacaaaaaccatggatgactggactctaccccagaccta

SEQ ID NO: 12614 - DNA, 201 bp, Homo sapiens
ctcaatgggcctgaagggctcttctaagagttaaaagcattttatttatttatttatttattttgagacggagtctcgctctgtcacccatgctggagtgyagtggcatgatcttggctcactgcaacctccgcctcccaggttcaagcaattctcatgtttcagcctcccaagaagctgggactacaggcacatgccacc

SEQ ID NO: 12615 - DNA, 201 bp, Homo sapiens
tagaaaaaatatttgtaacacaaagatttgacaaggattttgaatctagattatatataaagaacttctacaaatcaataatgaaactttgagcaatacartaaacataggcaaaaggtttgaacagatgtattacaaaagaggatatatgaatgatcaattaacacaaaaaaagatggtcaataccattagtccttagga

SEQ ID NO: 12616 - DNA, 201 bp, Homo sapiens
ataatctttagaggtataaactcagaagaatttttcaccaacatttaattctgtttataactatagaatttttttaaaagagggatctcagtgaatatctwtttcaacaagtttattttgtgaattaggaaacttaggtcaaagagataaagtgatgtgctgtaagaggaagaaccaagacaaaattcagtttccctgatt

SEQ ID NO: 12617 - DNA, 201 bp, Homo sapiens
agagtgcacatcataagagaagtaaaaaccacaatgaaagttcagaactgggagaaatatttgtttgaggtattgggaaagatttcagggaggaagtgtcrttttggaaggagcatgggggataagtaatttcatttgcagaaatgtgaagggatgggaggagtccaggcatgaacagatcacatgactgccattaagggt

SEQ ID NO: 12618 - DNA, 201 bp, Homo sapiens
cacagtgaaaccccgtctctactaaaaacacaaaaaattagttgggcgtggtggcgggcgcttgtggtcccagctactcgggaggctgaggcaggagaatrgcgcgaacccgggaggcagagtttgcagtgagaggagattgtgccactgcactccagcctgggcgacagagagagacaccgtctcaaaaaaaaaaaaaaa

SEQ ID NO: 12619 - DNA, 201 bp, Homo sapiens
ttaccaaactagttttattcctgcagaatcagtattcttacaacaagtgaatgtggagacctagaatgaattttaagtcaggtggctggtttttgtttctygggttaattttcttattttcttgctactcaaattgtgatctttgagccagcagtgtcaacaacacctggagattattagaactgcagtcctccaggttcc

SEQ ID NO: 12620 - DNA, 201 bp, Homo sapiens
aggcctggggctgctgagctcagtcccccacagccgtcataactgtcgttgacagcaactgctgctgtagatatcagtgggagtgggagagagctgaacgytcaaactagaagaaagagcagaaacaaatgtagttctatcagctcctttccccacctcagcccagaatttcgggacctatgttcttctgacagagaggca

SEQ ID NO: 12621 - DNA, 201 bp, Homo sapiens
gactgtggggcattcctaactggagatgtccaccaaagacatgtccaggccgggcgcagtggctcatgcctgtaatcctagcactttgagaggccgaggcrggcggatcacgaggtcaggagattgagaccatcctggctaacacagtgaaaccccgtctctactaaaaacacaaaaaattagttgggcgtggtggcgggc

SEQ ID NO: 12622 - DNA, 201 bp, Homo sapiens
ttggcccatgccagtggtcccagctactgaggaggctgaggcagaaggatcacttgaaccaggaggaggaggctgcagtgagccgaaatcaagccactgcmcttcctgggtgatggagtgagaccctgtctcaaaaagcaaaacaaaacaaaaaccatggatgactggactctaccccagacctatcaaatcagaacctct

SEQ ID NO: 12623 - DNA, 201 bp, Homo sapiens
ccccgtctctactaaaaacacaaaaaattagttgggcgtggtggcgggcgcttgtggtcccagctactcgggaggctgaggcaggagaatagcgcgaaccygggaggcagagtttgcagtgagaggagattgtgccactgcactccagcctgggcgacagagagagacaccgtctcaaaaaaaaaaaaaaaaaagacatgt

SEQ ID NO: 12624 - DNA, 201 bp, Homo sapiens
aggcaggtgtgtgagtcggtggctcactcataacttgctgagtagctaaagagctgatttagtgtaggaatgttgtgtaaatttcaagccttgtcctttcrtaaatagtcattgcaaagacaaagaaggtgtatttaacaaacttgaattgtttccaggtcacccatttgctgtagcagtgtttgaggattatgtgtggtt

SEQ ID NO: 12625 - DNA, 201 bp, Homo sapiens
ctttgagaggccgaggcaggcggatcacgaggtcaggagattgagaccatcctggctaacacagtgaaaccccgtctctactaaaaacacaaaaaattagytgggcgtggtggcgggcgcttgtggtcccagctactcgggaggctgaggcaggagaatagcgcgaacccgggaggcagagtttgcagtgagaggagattg

SEQ ID NO: 12626 - DNA, 201 bp, Homo sapiens
ggagtgagaccctgtctcaaaaagcaaaacaaaacaaaaaccatggatgactggactctaccccagacctatcaaatcagaacctctcaggttgggaaacraatcatctataatctatgtattataggtattttcctgtttctttgtctgtattaccttatatttcattgtctatctcttttttattttaattttttaatt

SEQ ID NO: 12627 - DNA, 201 bp, Homo sapiens
ataacattatttacataaacattttatataagttttgtgtgtaacttagaatttctgtatcagctggccatttgatctctaatttcttagttgtatctgtrctaggttagaatgtgcttgaaatgatgttacagtgtgttttggagattaatcacccaataatgatacatttatatagttattaattaccctgcataatta

SEQ ID NO: 12628 - DNA, 201 bp, Homo sapiens
gtgccacattttctttatgcagtctattatcgatagacatttgggttggttccaagtctttgctattgtgaatagtgccacaataaacatatgtgtgcatrtgtctgtatagtagcatgatttgtaatcctttgggtatatatccagtaatgggattgctgggtcaaatggtatttgtagttctagatccttgaggaattg

SEQ ID NO: 12629 - DNA, 201 bp, Homo sapiens
ttaaaagagggatctcagtgaatatctatttcaacaagtttattttgtgaattaggaaacttaggtcaaagagataaagtgatgtgctgtaagaggaagawccaagacaaaattcagtttccctgattggtaatccagtaatcatccagcatgctgagtttggaaagatttttatagggcaaaggaaagagtttttataag

SEQ ID NO: 12630 - DNA, 201 bp, Homo sapiens
caaagtggagtgtgaatatctacaggaactctttattgtctataaatagactttattttaaacagaaaaccagtaattaaaaattatttctgcttgtgttrgttgtcattgggaagtattttgtttaaatgagataaaatattaaaagtatacagtttggtctctttcttcccacccaggtcctgcacccttcttaatttt

SEQ ID NO: 12631 - DNA, 201 bp, Homo sapiens
ttcccccaaaagagtcatatgctctaagcccttttctaccacctcttgagagacaagattcttaggcacaaacttgacattttaattcagtagtccatcartaacattgtaatttttagcctggtgtgtaatcaatatcttggatatgtgtagaaagaatattgaatgatcaatggttcatcccattggatcattgccaaa

SEQ ID NO: 12632 - DNA, 201 bp, Homo sapiens
ttaatgtggtgattctaaccaacagcctgggttagaaccactgagttaatatatgtaaagtgcacaaaacagagcttggcatacaataaacactcgataarcccgagattctattaatgttttgttgttttaaaaattatttttatgaatgtaatggtattttctaaatgtggcttggtttcgcctataatcatcgaacat

SEQ ID NO: 12633 - DNA, 201 bp, Homo sapiens
atccgtgggggattggtatcccccaagatacccaaatctgcagatgcttaagttctaatataaaacggtgtatttgtatataacctagccacatcctcccwtatactttaaatcatctccaaattacttataatacctaatacaatgcctacatcacttcattcctgtgaattcaacatagtgcttggcatgtggcaaatt

SEQ ID NO: 12634 - DNA, 201 bp, Homo sapiens
aacagggaaagcaggcagtacattgggaaagggaggctcttcttagccctatttatatcctgtctgcctgtggtcccacctgctgcaagaagctgctgatygtcccttgtttgctcctgaagggggcagggatgctatagagtcatgtttagcatttaaattcatccagttttctccatttcttctgctactgttttatct

SEQ ID NO: 12635 - DNA, 201 bp, Homo sapiens
tttcagcctttttgctctggtttcttcccatcttagcggttttatctacctttggtctttgatgctggtgacctacggatggggttttgatgtggatgtcytttctgttgatgttgatgctattcatttctgtttgttagttttccttctaacagacaggccactcagctgcagatctgttggagtttgctggaggtccac

SEQ ID NO: 12636 - DNA, 201 bp, Homo sapiens
gtattgggtgtacatataattaggctacttagttcttcttgctgcattgatccctttaccattatgtaatggtcttctttgtctcttttgatctttgtttstctaaagtctgtttatcaaagaccaggattgcaatccctgctttttttttttttttgctttccattagcttggtagatcttcctccatccctttattttg

SEQ ID NO: 12637 - DNA, 201 bp, Homo sapiens
aataatgacctcctctgtgttgaacctacttaaaagaatattttaaatgtcggctgtgtataataacagagctgtacatggttgttctcaggagggtaaaygatgatcaaaatggcagatgtcaaccactctcgggtccactaaggatgccaagtcttctcatatttccccacattcacaagggacctctaattttaacag

SEQ ID NO: 12638 - DNA, 201 bp, Homo sapiens
tctcagactgctgcgctagcagtgagcaaggctccatgggtatgggaccagctgagccaggcaggggagggaacatccgggcctgctggttgcaaagaccrtgggaaaagcgcagtatttggacaaaagtgtacagttcctccagttacaggcactcacaacttcccttggctaggaaagggaaatcccctgaccccttgc

SEQ ID NO: 12639 - DNA, 201 bp, Homo sapiens
ctgcgctagcagtgagcaaggctccatgggtatgggaccagctgagccaggcaggggagggaacatccgggcctgctggttgcaaagaccgtgggaaaagygcagtatttggacaaaagtgtacagttcctccagttacaggcactcacaacttcccttggctaggaaagggaaatcccctgaccccttgcacttcccaca

SEQ ID NO: 12640 - DNA, 201 bp, Homo sapiens
accccttgcacttcccacatgaggcaacaccccaccctgcttcggctggccctccgtgggctgcacccactgtccaaccagtcccagtgggatgaaccagrtacctcagttggaaatgcagaaatcacccatcttctgtgtcaatcttgctgggagctgtagacctgagttgttcctattcggccatcttggaagcgccaa

SEQ ID NO: 12641 - DNA, 201 bp, Homo sapiens
gctgcacccactgtccaaccagtcccagtgggatgaaccaggtacctcagttggaaatgcagaaatcacccatcttctgtgtcaatcttgctgggagctgyagacctgagttgttcctattcggccatcttggaagcgccaaccctcttgtagctttaattcaacgtactctccaaagtggagttagtgttttctgactct

SEQ ID NO: 12642 - DNA, 201 bp, Homo sapiens
gtcccagtgggatgaaccaggtacctcagttggaaatgcagaaatcacccatcttctgtgtcaatcttgctgggagctgtagacctgagttgttcctattyggccatcttggaagcgccaaccctcttgtagctttaattcaacgtactctccaaagtggagttagtgttttctgactctagaacatagtccctgagtaaa

SEQ ID NO: 12643 - DNA, 201 bp, Homo sapiens
tcccagtgggatgaaccaggtacctcagttggaaatgcagaaatcacccatcttctgtgtcaatcttgctgggagctgtagacctgagttgttcctattcrgccatcttggaagcgccaaccctcttgtagctttaattcaacgtactctccaaagtggagttagtgttttctgactctagaacatagtccctgagtaaaa

SEQ ID NO: 12644 - DNA, 201 bp, Homo sapiens
atcacccatcttctgtgtcaatcttgctgggagctgtagacctgagttgttcctattcggccatcttggaagcgccaaccctcttgtagctttaattcaaygtactctccaaagtggagttagtgttttctgactctagaacatagtccctgagtaaaaggatgttaacccatcattttgttcaatgcttacaataaacac

SEQ ID NO: 12645 - DNA, 201 bp, Homo sapiens
tcacccatcttctgtgtcaatcttgctgggagctgtagacctgagttgttcctattcggccatcttggaagcgccaaccctcttgtagctttaattcaacrtactctccaaagtggagttagtgttttctgactctagaacatagtccctgagtaaaaggatgttaacccatcattttgttcaatgcttacaataaacaca

SEQ ID NO: 12646 - DNA, 201 bp, Homo sapiens
ttcggccatcttggaagcgccaaccctcttgtagctttaattcaacgtactctccaaagtggagttagtgttttctgactctagaacatagtccctgagtraaaggatgttaacccatcattttgttcaatgcttacaataaacacatttattaagtcatattaaagtattacttttgatgataaaacagaatggagtaag

SEQ ID NO: 12647 - DNA, 201 bp, Homo sapiens
tgtagctttaattcaacgtactctccaaagtggagttagtgttttctgactctagaacatagtccctgagtaaaaggatgttaacccatcattttgttcartgcttacaataaacacatttattaagtcatattaaagtattacttttgatgataaaacagaatggagtaagcccagcacagaagcaagaatatgttagaa

SEQ ID NO: 12648 - DNA, 201 bp, Homo sapiens
gagagagagaccaagaaaactaacttgacttgatgtaactaatttcatcctctggtgtcatctcagagcatcacaggcaagctgtgtgtggagtctgtcartaattagtggtgaggtttcccaagaagggatcaggttcccaagtagatattgaatattggggcatcagagttggtaggtggccatcacctagaacaggag

SEQ ID NO: 12649 - DNA, 201 bp, Homo sapiens
taccaagcaaggccctacaggcaccaagaaatctagtgaggtttgccacccagatttagcaaataaaaatgcaaagtgcccagtcaaatttgaatttcagrtaaatagagaacaaatttttagtgtatgtcccatgcaatatatgtggaattcaaatttatttgggcatcctgtatttatgtggtaaagataacagggtca

SEQ ID NO: 12650 - DNA, 201 bp, Homo sapiens
caggcaccaagaaatctagtgaggtttgccacccagatttagcaaataaaaatgcaaagtgcccagtcaaatttgaatttcaggtaaatagagaacaaatktttagtgtatgtcccatgcaatatatgtggaattcaaatttatttgggcatcctgtatttatgtggtaaagataacagggtcaaaatatttcagaacctt

SEQ ID NO: 12651 - DNA, 201 bp, Homo sapiens
aataaaaatgcaaagtgcccagtcaaatttgaatttcaggtaaatagagaacaaatttttagtgtatgtcccatgcaatatatgtggaattcaaatttatytgggcatcctgtatttatgtggtaaagataacagggtcaaaatatttcagaacctttacaggattctgaaattgaaacagcatttcaatttttcctgctt

SEQ ID NO: 12652 - DNA, 201 bp, Homo sapiens
gtattttatggataaagagtaaaaagtgtctttctcttcagagagttcatttttcataatttaccaatgttcatgtcttataatcagtttgtggagaagayaatttacaaagtggagtgtgaatatctacaggaactctttattgtctataaatagactttattttaaacagaaaaccagtaattaaaaattatttctgct

SEQ ID NO: 12653 - DNA, 201 bp, Homo sapiens
catttatttaatctacatctgtggtgtatattcttgaataaattcacacattgatatttagaagccccaaaatgagaaagtgaggatatgaatgtaatttygaaaatatctgagtttattaagtcagatcaccattttatgattaagatagattatttgcatgattatttcttgctatttgtaaggtaccccagtagctct

SEQ ID NO: 12654 - DNA, 201 bp, Homo sapiens
atatctgagtttattaagtcagatcaccattttatgattaagatagattatttgcatgattatttcttgctatttgtaaggtaccccagtagctctcaggkggggggcaatttttccctgagggaacaattggcagtgtctggaaacatttttggttgtcacaagtaggtgaggtaggaaggtggagacgatacaggcatc

SEQ ID NO: 12655 - DNA, 201 bp, Homo sapiens
tatctgagtttattaagtcagatcaccattttatgattaagatagattatttgcatgattatttcttgctatttgtaaggtaccccagtagctctcaggtrgggggcaatttttccctgagggaacaattggcagtgtctggaaacatttttggttgtcacaagtaggtgaggtaggaaggtggagacgatacaggcatct

SEQ ID NO: 12656 - DNA, 201 bp, Homo sapiens
ccattttatgattaagatagattatttgcatgattatttcttgctatttgtaaggtaccccagtagctctcaggtggggggcaatttttccctgagggaayaattggcagtgtctggaaacatttttggttgtcacaagtaggtgaggtaggaaggtggagacgatacaggcatctagtgggtagaggcctgggatgctgc

SEQ ID NO: 12657 - DNA, 201 bp, Homo sapiens
tgctatttgtaaggtaccccagtagctctcaggtggggggcaatttttccctgagggaacaattggcagtgtctggaaacatttttggttgtcacaagtargtgaggtaggaaggtggagacgatacaggcatctagtgggtagaggcctgggatgctgcaaaacatcttacactgtgcagaacagccccagaataaagaa

SEQ ID NO: 12658 - DNA, 201 bp, Homo sapiens
ggtaccccagtagctctcaggtggggggcaatttttccctgagggaacaattggcagtgtctggaaacatttttggttgtcacaagtaggtgaggtaggarggtggagacgatacaggcatctagtgggtagaggcctgggatgctgcaaaacatcttacactgtgcagaacagccccagaataaagaattgtccagcccc

SEQ ID NO: 12659 - DNA, 201 bp, Homo sapiens
ctagatttctttgtatgaaatgtagaaatagcacaggcttatgagattatgcaatttcagcccaactctgatttcagtgatgtcacctgggtagctggacrtctgccatggttgaatatttacaccatgaaaatctttaacagtacaaattggggcttctgcccaccttgcaacctccattccccaagaagaccagcttac

SEQ ID NO: 12660 - DNA, 201 bp, Homo sapiens
aaggaaggggcctattggaggaggagggccagaagaataaaggccacaatgagaaattcatcgagttcatgtctgtaagctcagactccaaggaaatcttkcatagcttggaattgagttcagttgaagatctggaaatttccattagcaaatggaactgaataagctgtctgtatggttgcatcaaaatttcaccattac

SEQ ID NO: 12661 - DNA, 201 bp, Homo sapiens
acaatgagaaattcatcgagttcatgtctgtaagctcagactccaaggaaatcttgcatagcttggaattgagttcagttgaagatctggaaatttccatyagcaaatggaactgaataagctgtctgtatggttgcatcaaaatttcaccattactatagttgaaatgatcaatacattatggttggcttcctaatttaa

SEQ ID NO: 12662 - DNA, 201 bp, Homo sapiens
gaagatctggaaatttccattagcaaatggaactgaataagctgtctgtatggttgcatcaaaatttcaccattactatagttgaaatgatcaatacattrtggttggcttcctaatttaaatagtgtgtaggataatttttagtttcaaagctataaatactatttccagaaatatttacttaagggtcagaggaggtaa

SEQ ID NO: 12663 - DNA, 201 bp, Homo sapiens
tatagttgaaatgatcaatacattatggttggcttcctaatttaaatagtgtgtaggataatttttagtttcaaagctataaatactatttccagaaatayttacttaagggtcagaggaggtaaatgctgcatcaaaacaaaggcaccgtatctgtgactattttattatttaaacaattttggaactgcataaagatga

SEQ ID NO: 12664 - DNA, 201 bp, Homo sapiens
tatttacaaatctagtgaagattgatagaattataacattgtaaattcaaagggatcctctcactgagaccaaagccctcttttgcagcacacaggcaccrttttctataggacagttgcctgcatttcaactgagacaggatccccccataaatattcctaactatcatggttttctgctatagaggcataattcccttt

SEQ ID NO: 12665 - DNA, 201 bp, Homo sapiens
tgatagaattataacattgtaaattcaaagggatcctctcactgagaccaaagccctcttttgcagcacacaggcaccgttttctataggacagttgcctrcatttcaactgagacaggatccccccataaatattcctaactatcatggttttctgctatagaggcataattccctttctaacttgaaatcacttgtaat

SEQ ID NO: 12666 - DNA, 201 bp, Homo sapiens
taggacagttgcctgcatttcaactgagacaggatccccccataaatattcctaactatcatggttttctgctatagaggcataattccctttctaacttraaatcacttgtaatgtctacaatagggcagtgtttacttgttgaataaattttcattcaaaatagtcaaacttgccctgtgaaggagctgctgaaacatt

SEQ ID NO: 12667 - DNA, 201 bp, Homo sapiens
atccaacacagtaagttttactcttggtataaaataaaacaattgtcatttgaagtccacaagataaattaattttacttttgtcaatggaactggtatartggtttaggccatagattttgaatccaaaagacttgagtttggccgggcgcggcggatcacgaggtcaggagatcgagaccatcctggctaacacggtga

SEQ ID NO: 12668 - DNA, 201 bp, Homo sapiens
tgaagtccacaagataaattaattttacttttgtcaatggaactggtatagtggtttaggccatagattttgaatccaaaagacttgagtttggccgggcrcggcggatcacgaggtcaggagatcgagaccatcctggctaacacggtgaaaccccgtctctactaaaaatacaaaaaattagccgggcgtggtggcgag

SEQ ID NO: 12669 - DNA, 201 bp, Homo sapiens
attttgaatccaaaagacttgagtttggccgggcgcggcggatcacgaggtcaggagatcgagaccatcctggctaacacggtgaaaccccgtctctactraaaatacaaaaaattagccgggcgtggtggcgagcacctgtagtcccagctattcgggaggctgaggcaggagaatggcgagaacccgggaggcggagct

SEQ ID NO: 12670 - DNA, 201 bp, Homo sapiens
cgcggcggatcacgaggtcaggagatcgagaccatcctggctaacacggtgaaaccccgtctctactaaaaatacaaaaaattagccgggcgtggtggcgrgcacctgtagtcccagctattcgggaggctgaggcaggagaatggcgagaacccgggaggcggagcttgcagtgagccgatatcgtgccactgcactcca

SEQ ID NO: 12671 - DNA, 201 bp, Homo sapiens
ggcggatcacgaggtcaggagatcgagaccatcctggctaacacggtgaaaccccgtctctactaaaaatacaaaaaattagccgggcgtggtggcgagcrcctgtagtcccagctattcgggaggctgaggcaggagaatggcgagaacccgggaggcggagcttgcagtgagccgatatcgtgccactgcactccagcc

SEQ ID NO: 12672 - DNA, 201 bp, Homo sapiens
ggagatcgagaccatcctggctaacacggtgaaaccccgtctctactaaaaatacaaaaaattagccgggcgtggtggcgagcacctgtagtcccagctaytcgggaggctgaggcaggagaatggcgagaacccgggaggcggagcttgcagtgagccgatatcgtgccactgcactccagcctgggcgacagagcgaga

SEQ ID NO: 12673 - DNA, 201 bp, Homo sapiens
agatcgagaccatcctggctaacacggtgaaaccccgtctctactaaaaatacaaaaaattagccgggcgtggtggcgagcacctgtagtcccagctattygggaggctgaggcaggagaatggcgagaacccgggaggcggagcttgcagtgagccgatatcgtgccactgcactccagcctgggcgacagagcgagact

SEQ ID NO: 12674 - DNA, 201 bp, Homo sapiens
tggtggcgagcacctgtagtcccagctattcgggaggctgaggcaggagaatggcgagaacccgggaggcggagcttgcagtgagccgatatcgtgccacwgcactccagcctgggcgacagagcgagactccgtctcaagaaaaagacttgagttcaagctccagatttaccgtctgttagatgagtgactttgagtagg

SEQ ID NO: 12675 - DNA, 201 bp, Homo sapiens
ctgtagtcccagctattcgggaggctgaggcaggagaatggcgagaacccgggaggcggagcttgcagtgagccgatatcgtgccactgcactccagcctsggcgacagagcgagactccgtctcaagaaaaagacttgagttcaagctccagatttaccgtctgttagatgagtgactttgagtaggttctataacttct

SEQ ID NO: 12676 - DNA, 201 bp, Homo sapiens
aagtgaaattctaataagacaaggaacaaatgttctgttgttcttttttcttttgtggttgctttttaggcataatttgtttgcaatgtccctttttggtsaccgtatcttctattcaacatggaaaatgaagacaatttggatagccaacaaacacactggaaaggacatggttagaattaacctccattcatcatttgt

SEQ ID NO: 12677 - DNA, 201 bp, Homo sapiens
tcacctgcttgagccagacaatgaggcgttgtaggggaaaaaaaatttttttcttcaaccctcatatattcttagtcataatagacccctgtaagaaaagwcagattaacaagaaaaaaacaaatagaaggccaggcatggtggctcacacttgtaatctccacattttggaaggctgaggtgggaggattgcttgaggcc

SEQ ID NO: 12678 - DNA, 201 bp, Homo sapiens
ggtggctcacacttgtaatctccacattttggaaggctgaggtgggaggattgcttgaggccaggagtttgagaccagcctggacaacataacaaggctcrgtctctacaaaaacgaaagaaagaaagaaagaaaaacaaatagaaatggattaacatgtacattttatatatacatgggagaaatccggggaatgaatag

SEQ ID NO: 12679 - DNA, 201 bp, Homo sapiens
agaaatccggggaatgaatagctctcaaagaggtggctttaaatgccagtttatatagtatctttaataaagaacagtaaatttttagagaagtgacaagrcagaggaaaaggactttgagtttctatgagtagcaacttgggggaaggcaaataaatggcagataaatgctagttaataaagtttgttaatgtaggtacc

SEQ ID NO: 12680 - DNA, 201 bp, Homo sapiens
cccactgtctcacccccagtttctaatccaacaccgaatccattccattctaccttctaaatacatttcaaatgtccacttctcttctctattgccactgmcatagtctaagcagacaggtacgttttgtttggcctactatagtagccactcaactgatccttctgttttctgaatctgatccattcactcccctacata

SEQ ID NO: 12681 - DNA, 201 bp, Homo sapiens
tagtctaagcagacaggtacgttttgtttggcctactatagtagccactcaactgatccttctgttttctgaatctgatccattcactcccctacataaartccttcaaaagcttttctttgcacttaggttgaagttcagcattttaccagtctcatcaatatttgaccaacctgctctagtgatctctgccctcactaa

SEQ ID NO: 12682 - DNA, 201 bp, Homo sapiens
tgcaacctccatttcctgacatcaagcaatcctcctgcctcagcctcccaagtagctgggattacaggtgtgcatcatcacacctggctaattttgttgtrtttttggtagaggtggggtttcaccatattacccaggctggtctcaaactcctgagctcaagcgatctgcctgcctcagcctcccaaagtgctgggatta

SEQ ID NO: 12683 - DNA, 201 bp, Homo sapiens
ggagaaccacttgaactcaaggggcagaggtttcagtgagccaagatcaggccactgcactgtagtctgggcaacagagcaagactccgtctcaaaccccmccccccacaaaaaaaccaagtgaaaaaaaattctttggcactctatctcctaaataatataataaggaataagttttaaagatacataatatctgagtac

SEQ ID NO: 12684 - DNA, 201 bp, Homo sapiens
agccaagatcaggccactgcactgtagtctgggcaacagagcaagactccgtctcaaaccccaccccccacaaaaaaaccaagtgaaaaaaaattctttgrcactctatctcctaaataatataataaggaataagttttaaagatacataatatctgagtacataggtttttttgttgttgtttgtttgtttcagttaga

SEQ ID NO: 12685 - DNA, 201 bp, Homo sapiens
aaatcagaatctctagagggtggcatactctccggttatctcaatgtacactagggacattttcaagggggcaagaatatgtttctactgaatcttactgktattggtcatgtctagtgatgttaaataaaatttatgggaggcaactgatttagactgagctcctgcaataggccccaacagaccaaaccaaaatgaagt

SEQ ID NO: 12686 - DNA, 201 bp, Homo sapiens
caatgtacactagggacattttcaagggggcaagaatatgtttctactgaatcttactgttattggtcatgtctagtgatgttaaataaaatttatgggargcaactgatttagactgagctcctgcaataggccccaacagaccaaaccaaaatgaagtcactcatgctaaaattccacatcaacacaccaaaactaact

SEQ ID NO: 12687 - DNA, 201 bp, Homo sapiens
ctcaggccctctgcctgctttgctcaggctcttgctgatttgtttcctgtgtccttcccagcaatggtggtgttctcagcagtcctttccttaggtcctcwgcttttcccatgatacatcagctctagctgattttaacaatgccatggcttcagaatccatgaccccaatagttttccttggccttcacctcttgccagg

SEQ ID NO: 12688 - DNA, 201 bp, Homo sapiens
ccatgatacatcagctctagctgattttaacaatgccatggcttcagaatccatgaccccaatagttttccttggccttcacctcttgccaggcctctggyctctgtatctacctgcattctaggtatctgcccttacgctcaagcttgctactgtatttctcatagtattttacaatggtgctattgtttttaaaatggg

SEQ ID NO: 12689 - DNA, 201 bp, Homo sapiens
atggcttcagaatccatgaccccaatagttttccttggccttcacctcttgccaggcctctggcctctgtatctacctgcattctaggtatctgcccttaygctcaagcttgctactgtatttctcatagtattttacaatggtgctattgtttttaaaatgggcaaaaaataaggtgcaaaagagacaaaaatctcatta

SEQ ID NO: 12690 - DNA, 201 bp, Homo sapiens
agttttccttggccttcacctcttgccaggcctctggcctctgtatctacctgcattctaggtatctgcccttacgctcaagcttgctactgtatttctcrtagtattttacaatggtgctattgtttttaaaatgggcaaaaaataaggtgcaaaagagacaaaaatctcattaactttttggaaagagatatgcagttg

SEQ ID NO: 12691 - DNA, 201 bp, Homo sapiens
tcccccagtatccgtgggggattggtatcccccaagatacccaaatctgcagatgcttaagttctaatataaaacggtgtatttgtatataacctagccayatcctcccatatactttaaatcatctccaaattacttataatacctaatacaatgcctacatcacttcattcctgtgaattcaacatagtgcttggcatg

SEQ ID NO: 12692 - DNA, 201 bp, Homo sapiens
cccaaatattttcagtcctaagttggttgaatccacagatatggagggccaactgtaggtgttactagtttagcccttgattctggctctgaaaatcccawtggtacaaaattgaccacttattcaatatagctggctaattcaacccaaacacccaactcgctgagcagattttactgtttattatggaatatttggaac

SEQ ID NO: 12693 - DNA, 201 bp, Homo sapiens
ggccaggcacagtggctcatgcctataatcccaacactttgggaggctgaggtgggcagatcacttgaggtaggagttcgagaccagcctggccaaccccrtctctactaaaaatacaaaaattagccaggtgtggtggtgtgcacctgtaatcccagctacttaggaggccaaggcaggagaatcgcttgaacacagaag

SEQ ID NO: 12694 - DNA, 201 bp, Homo sapiens
tggtgtgcacctgtaatcccagctacttaggaggccaaggcaggagaatcgcttgaacacagaaggctgaggttgcagtgagccaagattgtgccactgcwctccagcctgggtgacagggggagaccctgtctcaaaaaaaaaaaaaaaaaaaaagtattcttaggtttgaatctgttttcatttcctaagcagattatt

SEQ ID NO: 12695 - DNA, 201 bp, Homo sapiens
gagaggttttggagaagtaatacaattggagaaaaaagtgggcttcgggatgctggggaatctgggctctggctaagtttgcctccgtgagagatgcagcygtagacgttgtagggaggtaagacctcttaagaatcaggaaaagatttagcagtgtcctctgtcaaaacacggccccactccaaataaagcatcttctct

SEQ ID NO: 12696 - DNA, 201 bp, Homo sapiens
gtaatacaattggagaaaaaagtgggcttcgggatgctggggaatctgggctctggctaagtttgcctccgtgagagatgcagctgtagacgttgtagggmggtaagacctcttaagaatcaggaaaagatttagcagtgtcctctgtcaaaacacggccccactccaaataaagcatcttctcttttagagcagaaactt

SEQ ID NO: 12697 - DNA, 201 bp, Homo sapiens
tcacacttgtgcatgtgtgcagagggatacgccctaagtcgagaccggaagtactgtgaaggtaatgactggaagtactgtgaaggtaatggaagagtcgytgcttgaggggaggaatgctcaactgagccagcggcttgtcttcagtgggccagccagagactcagtggaaaaccaacttcaagtccattctccccgtcc

SEQ ID NO: 12698 - DNA, 201 bp, Homo sapiens
gaattagctggggtgagacctcaggtaaatctagcatctgcctgttaattataaccccctgcttacatgggaccaatgggtgaaagccatggcatagagayagtgagctggaaggctggggcttcagccagaataaaactgctggagaaggtttccacatttagggaaagggctctggtcagtcttgaaggttgaagagca

SEQ ID NO: 12699 - DNA, 201 bp, Homo sapiens
gcatagagatagtgagctggaaggctggggcttcagccagaataaaactgctggagaaggtttccacatttagggaaagggctctggtcagtcttgaaggktgaagagcacaataggaaatgtcctaagcttgtaaagagctttcaagagtccctaactgaaatggcatgctatatcttttcaagggaaataatactacct

SEQ ID NO: 12700 - DNA, 201 bp, Homo sapiens
taagctgggccaggcgtggtgactcacacttgtaatctcggcactttgggaagccaaggcgggcagatcacttgagtcccagagttcaagatcagcctgarcaatgtagcaaaaccccatgtctacaaaatatacaaaaattagctgagtgttgtggtgtgcacctgtagtcccagctactcaggaggctgaggtgggagg

SEQ ID NO: 12701 - DNA, 201 bp, Homo sapiens
tactcaggaggctgaggtgggaggatcacttgagcttgggaagcagaggttgcagtgagctgagatcgtggcattgcactccagcctgggtgacagagccrgactctatctcggggaaaacaaaagcataaaatgtgacagaatagaaatggcttttatcatcatttaattgacttattttaccctttgctagagtatgga

SEQ ID NO: 12702 - DNA, 201 bp, Homo sapiens
gggaaaacaaaagcataaaatgtgacagaatagaaatggcttttatcatcatttaattgacttattttaccctttgctagagtatggaaaacagactttcyatgatcaattacagcatatacaagtgtgagataccctgcgttgtgatgacttattagtgatagcacaatttattttcaaaaatagccatttgaatgtatt

SEQ ID NO: 12703 - DNA, 201 bp, Homo sapiens
cttttatcatcatttaattgacttattttaccctttgctagagtatggaaaacagactttccatgatcaattacagcatatacaagtgtgagataccctgygttgtgatgacttattagtgatagcacaatttattttcaaaaatagccatttgaatgtattgtgctgttgtcattgtgcagatgttaatgaatgtgcttt

SEQ ID NO: 12704 - DNA, 201 bp, Homo sapiens
tcatttaattgacttattttaccctttgctagagtatggaaaacagactttccatgatcaattacagcatatacaagtgtgagataccctgcgttgtgatsacttattagtgatagcacaatttattttcaaaaatagccatttgaatgtattgtgctgttgtcattgtgcagatgttaatgaatgtgctttttggaatca

SEQ ID NO: 12705 - DNA, 201 bp, Homo sapiens
acttattagtgatagcacaatttattttcaaaaatagccatttgaatgtattgtgctgttgtcattgtgcagatgttaatgaatgtgctttttggaatcayggctgtactcttgggtgtaaaaacacccctggatcctattactgcacgtgccctgtaggatttgttctgcttcctgatgggaaacgatgtcatcgtaagt

SEQ ID NO: 12706 - DNA, 201 bp, Homo sapiens
agccaggcatgttggcccatgccagtggtcccagctactgaggaggctgaggcagaaggatcacttgaaccaggaggaggaggctgcagtgagccgaaatsaagccactgcccttcctgggtgatggagtgagaccctgtctcaaaaagcaaaacaaaacaaaaaccatggatgactggactctaccccagacctatcaaa

SEQ ID NO: 12707 - DNA, 201 bp, Homo sapiens
cattaaaaaattaaggctaggcacagtggctcacacctgtaatcccaacactttgggaggtcaaggcaggaggatcacctggcaatattagcaactgattkcaataaatttttgcaaacccgatttaacactaatcttgaccttgttctttattaattagaacttgtttcctgtccacgcaatgtgtctgaatgcagccat

SEQ ID NO: 12708 - DNA, 201 bp, Homo sapiens
attaaaaaattaaggctaggcacagtggctcacacctgtaatcccaacactttgggaggtcaaggcaggaggatcacctggcaatattagcaactgattgyaataaatttttgcaaacccgatttaacactaatcttgaccttgttctttattaattagaacttgtttcctgtccacgcaatgtgtctgaatgcagccatg

SEQ ID NO: 12709 - DNA, 201 bp, Homo sapiens
cacagtggctcacacctgtaatcccaacactttgggaggtcaaggcaggaggatcacctggcaatattagcaactgattgcaataaatttttgcaaaccckatttaacactaatcttgaccttgttctttattaattagaacttgtttcctgtccacgcaatgtgtctgaatgcagccatgactgtgttctgacatcagaa

SEQ ID NO: 12710 - DNA, 201 bp, Homo sapiens
gtgttctgacatcagaaggtcccttatgtttctgtcctgaaggctcagtgcttgagagagatgggaaaacatgtagcggtgagtttatttgctttatttaycttttgtttgtttgaaaacatacatttgctcagtgacatctaaaaattgatcttgttgtcaaggaagaattgattttccaatattgtatactgaaagata

SEQ ID NO: 12711 - DNA, 201 bp, Homo sapiens
tccaatattgtatactgaaagatattgttacaacagattaacatagatttaaatttagtatttttgggtttttggcttttttgtttttgtttagacagcakagcgtctaacttatgagcaagggctttgaggcttgacagccctgaggtagcattaccagttactagcagttttgattttggtctagatacttgccctctc

SEQ ID NO: 12712 - DNA, 201 bp, Homo sapiens
agatgcagagtgcttagtctgtttcttgcacctaataaacacctctctacttttatcttcatagagacttaagtatatagataactggatgtaactcagarttagcagaagaattgtgtgtgtgtttttgattttctaataaaacaaagccaagcagctaaaaatgtgtgagagaaaaaaattactaggaagagttagacc

SEQ ID NO: 12713 - DNA, 201 bp, Homo sapiens
agtctgtttcttgcacctaataaacacctctctacttttatcttcatagagacttaagtatatagataactggatgtaactcagaattagcagaagaattrtgtgtgtgtttttgattttctaataaaacaaagccaagcagctaaaaatgtgtgagagaaaaaaattactaggaagagttagaccagctgccaaactcat

SEQ ID NO: 12714 - DNA, 201 bp, Homo sapiens
gatttttcattctagacagctgccagtgcacttgctcctgaactcattggtagaataagaggacaagggccactggaatgtgaaggattaacatccaagaygttgggttatagggaaggagggtagtgtgacattttgatttttatctctgaaaaataaccttgattgcagccatatgaatgattgtggaaatgttttaaa

SEQ ID NO: 12715 - DNA, 201 bp, Homo sapiens
ggacaagggccactggaatgtgaaggattaacatccaagatgttgggttatagggaaggagggtagtgtgacattttgatttttatctctgaaaaataacyttgattgcagccatatgaatgattgtggaaatgttttaaaaaatcaacatatgggctgagtgcagtggctcatgcctggaatcctagcattttgggaggc

SEQ ID NO: 12716 - DNA, 201 bp, Homo sapiens
gtggctcatgcctggaatcctagcattttgggaggctgaggcagatagatctcctgaggtcaggagtttgagaccagcctggccaacatggtgaaaccccrtctctactaaaaatacaaaaatcaaccaggcatggtggcgggtgcctgtaatcccagctacttgggaagctgaggcaggagaattgcttgaacttgggag

SEQ ID NO: 12717 - DNA, 201 bp, Homo sapiens
ctctactaaaaatacaaaaatcaaccaggcatggtggcgggtgcctgtaatcccagctacttgggaagctgaggcaggagaattgcttgaacttgggaggmggaggttgcaatgagccgagagtgccattgcactccagcctgggtgaaagagtgaaactccatctcaaaaaaaaaaaaaaaaattaacaaatggttgact

SEQ ID NO: 12718 - DNA, 201 bp, Homo sapiens
tcaaaaaaaaaaaaaaaaattaacaaatggttgactcgcccccatcctttgatgaaaaataattatattttggatgacgtagcatcattactaagcaattktttttgtaggttgttcctcacccgataatggtggatgtagccagctctgcgttcctcttagcccagtatcctgggaatgtgattgctttcctgggtatga

SEQ ID NO: 12719 - DNA, 201 bp, Homo sapiens
cgtagcatcattactaagcaattgtttttgtaggttgttcctcacccgataatggtggatgtagccagctctgcgttcctcttagcccagtatcctgggartgtgattgctttcctgggtatgacctacaactggatgaaaaaagctgtgcagcttcaggttagtgctgtggttgtctggaactgtgtccctgaaaaaaaa

SEQ ID NO: 12720 - DNA, 201 bp, Homo sapiens
ctattcttaattagcatccggcaaagatttgccataatatcagatagaatatttttagtatatgagaaagtcatgacaagaatagtcttaaaacactttayagttaagaggcatttaataagtatttgttgattgatttgatttttatctctctactgaatataattataacactgacaaattctgtccttttaatgtcaa

SEQ ID NO: 12721 - DNA, 201 bp, Homo sapiens
aagatttgccataatatcagatagaatatttttagtatatgagaaagtcatgacaagaatagtcttaaaacactttatagttaagaggcatttaataagtrtttgttgattgatttgatttttatctctctactgaatataattataacactgacaaattctgtccttttaatgtcaaaattcaatataaagttgtacgct

SEQ ID NO: 12722 - DNA, 201 bp, Homo sapiens
gtcaaaattcaatataaagttgtacgcttcagctattttttttgtcttctgatattacctctcttgcatccttcaacagccatggaaattctagatttatrccaaattgatttaatatctcctgaaggttcattatgttttaaacatataatgctcataatgctatcatgtaatgatgatcctgtataccttgccctagtg

SEQ ID NO: 12723 - DNA, 201 bp, Homo sapiens
cttctgatattacctctcttgcatccttcaacagccatggaaattctagatttataccaaattgatttaatatctcctgaaggttcattatgttttaaacwtataatgctcataatgctatcatgtaatgatgatcctgtataccttgccctagtgagaccccaatactgttaacttctcagggccttcattaatatagtg

SEQ ID NO: 12724 - DNA, 201 bp, Homo sapiens
accccaatactgttaacttctcagggccttcattaatatagtgtaatctaaatccttaaaattatcaagggtcttgctattaactcaaatcattgtgcctycctttaagaagtgcccaggccagggaaagttacttattcggacatgaaagtatacaatctactaatattagtgtttcagtatgtgtgaatcaagaagatg

SEQ ID NO: 12725 - DNA, 201 bp, Homo sapiens
ttaaggacttttttgccatcataatgctaccctagtccttgctacgattagccgttttattggaaatgatcacacagtttagttttagattttcagtttartttcctctttggagatgaggatgggagactagcacagtgtcatgcatatagaaggagcttcataaccaggttttttattacttgctggtagtgagaggag

SEQ ID NO: 12726 - DNA, 201 bp, Homo sapiens
aataacattatttacataaacattttatataagttttgtgtgtaacttagaatttctgtatcagctggccatttgatctctaatttcttagttgtatctgkgctaggttagaatgtgcttgaaatgatgttacagtgtgttttggagattaatcacccaataatgatacatttatatagttattaattaccctgcataatt

SEQ ID NO: 12727 - DNA, 201 bp, Homo sapiens
tagttgtatctgtgctaggttagaatgtgcttgaaatgatgttacagtgtgttttggagattaatcacccaataatgatacatttatatagttattaattrccctgcataattatttagttattactatgtggtacattaattcctagactttcaaactttgggcttttgtttcttcctgatttgaagcagtctggtaaat

SEQ ID NO: 12728 - DNA, 201 bp, Homo sapiens
tgcataattatttagttattactatgtggtacattaattcctagactttcaaactttgggcttttgtttcttcctgatttgaagcagtctggtaaatggcmaaaagaaacaaagtgaagccaattgattctatatttaataggtatggattggtagccaaatagaagtatttttgcaaattaaagttttgcaattgaacac

SEQ ID NO: 12729 - DNA, 201 bp, Homo sapiens
aggcagttcaagattcatttattaccaaactagttttattcctgcagaatcagtattcttacaacaagtgaatgtggagacctagaatgaattttaagtcrggtggctggtttttgtttcttgggttaattttcttattttcttgctactcaaattgtgatctttgagccagcagtgtcaacaacacctggagattattag

SEQ ID NO: 12730 - DNA, 201 bp, Homo sapiens
taccaaactagttttattcctgcagaatcagtattcttacaacaagtgaatgtggagacctagaatgaattttaagtcaggtggctggtttttgtttcttrggttaattttcttattttcttgctactcaaattgtgatctttgagccagcagtgtcaacaacacctggagattattagaactgcagtcctccaggttcca

SEQ ID NO: 12731 - DNA, 201 bp, Homo sapiens
gttctctattccattccattggtttatgtgtctgtttttatactagtaccatactgtttgggttactacagccttatagtataaagtcaggtactatggtrccttcagctttatttctttttgcttagtatcgtctgtgctcttcaggcttatttttggtttcatgtgaattttaggattgttttttctaattctgtgaag

SEQ ID NO: 12732 - DNA, 201 bp, Homo sapiens
ttgcattgtatctgtatattgctttgggtcatttttaaacagtcttatggaaattcttgtacctgtgtgataggctgcatactagactgtaaaagaacttygcattggcaagaaatcttctgttgaacaagatggatgaattaaaatgaaattacagtcatgcatcactaatggtctagcttcttgctcctaggctacaaa

SEQ ID NO: 12733 - DNA, 201 bp, Homo sapiens
tgcatactagactgtaaaagaacttcgcattggcaagaaatcttctgttgaacaagatggatgaattaaaatgaaattacagtcatgcatcactaatggtytagcttcttgctcctaggctacaaacctgtgcggatgttactatgctgaatactgtaagcagtattgtaacacagtagtaaaaatttgtgtatctaaaca

SEQ ID NO: 12734 - DNA, 201 bp, Homo sapiens
tacagtcatgcatcactaatggtctagcttcttgctcctaggctacaaacctgtgcggatgttactatgctgaatactgtaagcagtattgtaacacagtmgtaaaaatttgtgtatctaaacatagaaaaggtacagtaaaaaatatggcataagagatattttaaaatgatacacctttatagggcacttaccatgaat

SEQ ID NO: 12735 - DNA, 201 bp, Homo sapiens
ttaggacatgactgtacattgctgtagacaaacactgaacatttaggctacactaaacttataagaaaagtaatttcactatgacattttgaatgctacartgtcactaggtgatagaaatttttcagttccattatcatcttacggaatcaccatcgtatatgcagttcatcatcaaccgaaatgtcattatgtggcatc

SEQ ID NO: 12736 - DNA, 201 bp, Homo sapiens
tgcagttcatcatcaaccgaaatgtcattatgtggcatctgattgaatataagattagagactaaaggaactttagcaaatacctagtctaacttcctcakttttacagttgagaaaattgaggttaaagaatttatccaaagcaatcaagcaaataagtgacaaaactgggaaccagttttgacctgcagtgactaagta

SEQ ID NO: 12737 - DNA, 201 bp, Homo sapiens
tgccccctttcagaagccacagtagttcaagcatgatggctacgtcattgaccaatgatcaagggttaataaattaccaatagcagtagcaatatgtgccrgatacatggctaaggagatctatctatctatctctctatctatctatagcaataacaatagcaatagcaatatgtgccagatacatggctaaggatatat

SEQ ID NO: 12738 - DNA, 201 bp, Homo sapiens
ccctttcagaagccacagtagttcaagcatgatggctacgtcattgaccaatgatcaagggttaataaattaccaatagcagtagcaatatgtgccagatrcatggctaaggagatctatctatctatctctctatctatctatagcaataacaatagcaatagcaatatgtgccagatacatggctaaggatatatgtat

SEQ ID NO: 12739 - DNA, 201 bp, Homo sapiens
attaaataacttgcttaaggttacacgtatctgggaagcagcctagttcgaatttagttgcaggtgtgcctatctccaaagtcaagctcttaacaccctgyacaacctaaagactagtgccatttgtatatattccacattagttttaaaaaaaaatcagaaatgcctgtgttctcttttgtagatatactttgcccatac

SEQ ID NO: 12740 - DNA, 201 bp, Homo sapiens
ttttggagggtgggtggcaaggggagggatagctttaggagaaatacctaatgtagatgacgggttgatgggtgtagcaaaccaccatggcacatgtatayctatgtaataaacctgcacgttctgcacatgtatcccagaacttaaaatataataataaaaaaaaaagtagcctgtgttttggtagttcaggcttttgtt

SEQ ID NO: 12741 - DNA, 201 bp, Homo sapiens
tggcaaggggagggatagctttaggagaaatacctaatgtagatgacgggttgatgggtgtagcaaaccaccatggcacatgtatatctatgtaataaacstgcacgttctgcacatgtatcccagaacttaaaatataataataaaaaaaaaagtagcctgtgttttggtagttcaggcttttgttatcagggaaactca

SEQ ID NO: 12742 - DNA, 201 bp, Homo sapiens
tgacgggttgatgggtgtagcaaaccaccatggcacatgtatatctatgtaataaacctgcacgttctgcacatgtatcccagaacttaaaatataataayaaaaaaaaaagtagcctgtgttttggtagttcaggcttttgttatcagggaaactcaaaacctgtctgaatataagcaataagcattctcggagcatctg

SEQ ID NO: 12743 - DNA, 201 bp, Homo sapiens
atataataataaaaaaaaaagtagcctgtgttttggtagttcaggcttttgttatcagggaaactcaaaacctgtctgaatataagcaataagcattctcrgagcatctgctatggaaataagactttctccgaagtcacatgggagatacagaggagcctaagatgtgctccatcttttcagtcggttcttagtttagct

SEQ ID NO: 12744 - DNA, 201 bp, Homo sapiens
agcaataagcattctcggagcatctgctatggaaataagactttctccgaagtcacatgggagatacagaggagcctaagatgtgctccatcttttcagtmggttcttagtttagctggggagataaggtatatttccccagcaaaataattaatgcaaattcttggtctaaatagcagttcaagaaatgtcatagggcca

SEQ ID NO: 12745 - DNA, 201 bp, Homo sapiens
tatggaaataagactttctccgaagtcacatgggagatacagaggagcctaagatgtgctccatcttttcagtcggttcttagtttagctggggagataargtatatttccccagcaaaataattaatgcaaattcttggtctaaatagcagttcaagaaatgtcatagggccacacataaataattgccaaatgacaggt

SEQ ID NO: 12746 - DNA, 201 bp, Homo sapiens
tcagtaaatatttgtttgacaaataaatagaaaaatcaggaaataagaattttctaccctgccagattccattgggttatttaatgtaaagattagcaagwaatatttcagtaccattggccctgtttatctacagcttccacatctgaggattcgaccaaccttggatcaaaaatattcaaaaattaaattaaattaaaa

SEQ ID NO: 12747 - DNA, 201 bp, Homo sapiens
gattagcaagtaatatttcagtaccattggccctgtttatctacagcttccacatctgaggattcgaccaaccttggatcaaaaatattcaaaaattaaaytaaattaaaaataagaatacagtcataaaaaataatacaaataaaaaccaataacttataactgtatttacatagcatttacattacatgaggtataagt

SEQ ID NO: 12748 - DNA, 201 bp, Homo sapiens
aataagaatacagtcataaaaaataatacaaataaaaaccaataacttataactgtatttacatagcatttacattacatgaggtataagtaatctagagwtgatttaaagtgtacaggagaatgtacatagattgtatccaaatactgtgccattttatatcagggaattgagcatccttggagagttctggtaccaatc

SEQ ID NO: 12749 - DNA, 201 bp, Homo sapiens
atccttggagagttctggtaccaatcccccacagatgccaagggacaattttactcccatttgtcttagaattaaatggaagaaaattaaagccaatgtaratctccacctactgtctctgtgctggcttgtctccctcgtcttcatgatcccatgaggataacagtctctttgcttctggcttccattggtttcagcagg

SEQ ID NO: 12750 - DNA, 201 bp, Homo sapiens
acactggaaatttcacaatgatttatgggagataatatattgatagtagttgataattgatttggagccagccaaatgattaaaactgtgagaacgtaacmatttctaaataggccaataaaaattatgaaccatattgacttcaaaaaaaatgtgcccagcacctgatttatggaagttgaaattaactgagttaataga

SEQ ID NO: 12751 - DNA, 201 bp, Homo sapiens
gctttcttgattaaaggagattattctggactgatacagggattaatccacgaattgaaagttcttccctccaaggccttggccgtctggttatagccagstctgatctaatctggcccagtggaataacgattgacttcttaactgacaagttgtactggtgcgatgccaagcagtctgtgattgaaatggccaatctgg

SEQ ID NO: 12752 - DNA, 201 bp, Homo sapiens
cttccctccaaggccttggccgtctggttatagccagctctgatctaatctggcccagtggaataacgattgacttcttaactgacaagttgtactggtgygatgccaagcagtctgtgattgaaatggccaatctggatggttcaaaacgccgaagacttacccagaatgatgtaggtgaggctttgggatgggcgattt

SEQ ID NO: 12753 - DNA, 201 bp, Homo sapiens
ttatgagtgttaaatacaaaatatgtttacacacacacacataccacttagccgtatgggtgaatatggaatagagacagacttctccagggaatcatgarctgcaaagcttaccttaacattggaatacggggtaaaaaatagtgttgcataatcatttctctttctgagaagtcccaaaatcagaatgaaaatattaaa

SEQ ID NO: 12754 - DNA, 201 bp, Homo sapiens
gccgtatgggtgaatatggaatagagacagacttctccagggaatcatgagctgcaaagcttaccttaacattggaatacggggtaaaaaatagtgttgcrtaatcatttctctttctgagaagtcccaaaatcagaatgaaaatattaaaattttctaaactcctttaggaataagaacttggttcagctgttttcattt

SEQ ID NO: 12755 - DNA, 201 bp, Homo sapiens
ggatagctgcttaggtaaagtataggagttcgattggaatttggagagaaggaaatctgttagaagcctatagtggttgtccaggcaacaactggtgatgktctgagtttgaacattgtcatttaaaaatggaatgaaggattatgatattaaaaattattgtgcataaaaaattaagaggattttgtaacagattgcata

SEQ ID NO: 12756 - DNA, 201 bp, Homo sapiens
ctgggcatggtggctcacacctgtaatcccagcactttgggaggccaaggtgggaggatcactagagcccaggagttcgagtccagcctggccaacatggmgaaactctgctccactaaaaatacaaaaattagctgggcatggtggtgagtgcctgtaatccctctgccactcaggaggctgaggtgaaaagatcacttg

SEQ ID NO: 12757 - DNA, 201 bp, Homo sapiens
gccgtgattgtgcaactgtactccagcctgggtgacggagtgaaaccgtctcaaaaaatacaaaaaccaaaaaatacatcacccaaataaatgtaaaattrtatctttgacataaaaaggtagaaaggaatttgaaaatttctaacccgaatgtgaggacactatattttaaactaaaaagcatagcagatactttgtgta

SEQ ID NO: 12758 - DNA, 201 bp, Homo sapiens
gcaactgtactccagcctgggtgacggagtgaaaccgtctcaaaaaatacaaaaaccaaaaaatacatcacccaaataaatgtaaaattgtatctttgacwtaaaaaggtagaaaggaatttgaaaatttctaacccgaatgtgaggacactatattttaaactaaaaagcatagcagatactttgtgtatcatttatatt

SEQ ID NO: 12759 - DNA, 201 bp, Homo sapiens
atttcttctaagagtggatgttccatgctgttaccacaaaaatgataactgaggtaatgcatttgttaattggctagattcagccattccacaatgtatayatattttaaaacatcatgttgtatgcaataaaaacatataatattgtttgtacattaaaaatgtattttaaaaggttgaagatattcttaatttaaaatg

SEQ ID NO: 12760 - DNA, 201 bp, Homo sapiens
tggatgttccatgctgttaccacaaaaatgataactgaggtaatgcatttgttaattggctagattcagccattccacaatgtatatatattttaaaacaycatgttgtatgcaataaaaacatataatattgtttgtacattaaaaatgtattttaaaaggttgaagatattcttaatttaaaatgcaattaattgtggt

SEQ ID NO: 12761 - DNA, 201 bp, Homo sapiens
tgttgtatgcaataaaaacatataatattgtttgtacattaaaaatgtattttaaaaggttgaagatattcttaatttaaaatgcaattaattgtggttcytctgtaaacaaaaaataagaaagattatgtctagtgtgaggtatttgtttaaacactatagctaattctaacatgtgctttaacatggattaattcctga

SEQ ID NO: 12762 - DNA, 201 bp, Homo sapiens
aaaggagaatggtggtttccaggggatgtgggagaggaaatgagaagttgtttaatggacatagagtttcagttttgcaagatgaaaaaattctggagatkggttgtacaacaatgtgtgaatgtacttaacactactgaacttagaaatggttgagctgttaagttttctgttatgctttttcaccatgataaaaaagaa

SEQ ID NO: 12763 - DNA, 201 bp, Homo sapiens
attggttgtacaacaatgtgtgaatgtacttaacactactgaacttagaaatggttgagctgttaagttttctgttatgctttttcaccatgataaaaaaraactatagctatgttaaaaattcccttgctgtacttaaggctttaatttgggacaaagggccagagactagaatgaatcttaatgaccctgatcaacaat

SEQ ID NO: 12764 - DNA, 201 bp, Homo sapiens
tatgctttttcaccatgataaaaaagaactatagctatgttaaaaattcccttgctgtacttaaggctttaatttgggacaaagggccagagactagaatkaatcttaatgaccctgatcaacaatgataagtggagactcattgtaaccagaacaagttatttgagtttgccaccagtaggggaagacattcattctaat

SEQ ID NO: 12765 - DNA, 201 bp, Homo sapiens
cagagcagttccagtggcacagagaggtaggtttggtgaaggtgggctcagaaagatgcccacttactgttagtaggaggcatgaaaatggaggcagctgrtaataaatgactctttcaaaaatgtggctaaaaagggaaggaaagagacaaggaggagctagaggggtcacggggatgaggaaatgaagatgggagagag

SEQ ID NO: 12766 - DNA, 201 bp, Homo sapiens
aataaatgactctttcaaaaatgtggctaaaaagggaaggaaagagacaaggaggagctagaggggtcacggggatgaggaaatgaagatgggagagaggwtatagtagacagagggaacaaagctagtggaatgaagagagggaagatgtaagagaaagggggtggtcgttgatggatccaggccctagagaaggcagga

SEQ ID NO: 12767 - DNA, 201 bp, Homo sapiens
acggggatgaggaaatgaagatgggagagaggttatagtagacagagggaacaaagctagtggaatgaagagagggaagatgtaagagaaagggggtggtygttgatggatccaggccctagagaaggcaggaagggtgacatcaggggcacaggtcaatattaaataaggagagaggggaaagaaggtgggggactaatg

SEQ ID NO: 12768 - DNA, 201 bp, Homo sapiens
gaaagggggtggtcgttgatggatccaggccctagagaaggcaggaagggtgacatcaggggcacaggtcaatattaaataaggagagaggggaaagaagrtgggggactaatgcaggcaaatgtgttggtggagatgggaatgtggggagactcttatacaattacctcaaattttgaaaaatccttacaagaacttgtg

SEQ ID NO: 12769 - DNA, 201 bp, Homo sapiens
gggtggtcgttgatggatccaggccctagagaaggcaggaagggtgacatcaggggcacaggtcaatattaaataaggagagaggggaaagaaggtggggractaatgcaggcaaatgtgttggtggagatgggaatgtggggagactcttatacaattacctcaaattttgaaaaatccttacaagaacttgtgaatttg

SEQ ID NO: 12770 - DNA, 201 bp, Homo sapiens
aggcaggaagggtgacatcaggggcacaggtcaatattaaataaggagagaggggaaagaaggtgggggactaatgcaggcaaatgtgttggtggagatgkgaatgtggggagactcttatacaattacctcaaattttgaaaaatccttacaagaacttgtgaatttgatctaccccttattactgctgctcaaaagagt

SEQ ID NO: 12771 - DNA, 201 bp, Homo sapiens
tgtgagtcggtggctcactcataacttgctgagtagctaaagagctgatttagtgtaggaatgttgtgtaaatttcaagccttgtcctttcgtaaatagtyattgcaaagacaaagaaggtgtatttaacaaacttgaattgtttccaggtcacccatttgctgtagcagtgtttgaggattatgtgtggttctcagattg

SEQ ID NO: 12772 - DNA, 201 bp, Homo sapiens
caactgttttaattgtttgatgtcatgcagttggcgggggggtggaggggattttgtaactttcactaactgtgtagatgttaagattttctaagatttargtttgtttaagacaatctggtagtttggtaattggggctttatccctccaatttcacctcttttcttgaacaacttttacttacctgctgcatttcgaag

SEQ ID NO: 12773 - DNA, 201 bp, Homo sapiens
tggggctttatccctccaatttcacctcttttcttgaacaacttttacttacctgctgcatttcgaagagccttgggttaaggcaggcaatttagacaccrgcagtggaagcttctgtcgacacttggacctttccatacccctgaggagtgagcaaatggaaaaggcatttcacattttatagtagctcttctttctgaa

SEQ ID NO: 12774 - DNA, 201 bp, Homo sapiens
catttgactaaagagcttcttgaaaaaagtgctggctatacccagtactaataaggtaataacattctgggcttatcttagaatcagtggctccttggggkaactcttctgaaatagctattgatataccctctatttagatacactgcatttctctccctaaaagctatagctccctaaaagcaagctgtagacttgcat

SEQ ID NO: 12775 - DNA, 201 bp, Homo sapiens
atcttagaatcagtggctccttgggggaactcttctgaaatagctattgatataccctctatttagatacactgcatttctctccctaaaagctatagctycctaaaagcaagctgtagacttgcattaatggcatccttttcatcttcaaacccacttgtgaatttgtttcttttctctactaggagcagatccctgctt

SEQ ID NO: 12776 - DNA, 201 bp, Homo sapiens
aatttacttatgtttttcctctagctaaccatcataactttagtatgcactgaaagaatttatatgcatttcttattttattacatagagtgttaaaaagstgtgtagtcaatggtcaagagttttaaaaattaataattcttattgattcacaacaatcttcttgtgaaactgggttttatttttattttttgagacagg

SEQ ID NO: 12777 - DNA, 201 bp, Homo sapiens
atttatatgcatttcttattttattacatagagtgttaaaaagctgtgtagtcaatggtcaagagttttaaaaattaataattcttattgattcacaacartcttcttgtgaaactgggttttatttttattttttgagacagggtctccctctgttgctcaggctggagtacagtggcatgttcatggctcactgcagcc

SEQ ID NO: 12778 - DNA, 201 bp, Homo sapiens
tggagtacagtggcatgttcatggctcactgcagccttggccccacccaggctcaaatagctgggaccctaccttagcctcctagtagctgggaccacagscatgcaccaccatgcctggctaatttatttttatttttatttaatttatttaaattattaattattaatgtatttaaattattaatttattttattttat

SEQ ID NO: 12779 - DNA, 201 bp, Homo sapiens
cctcatgtgatccacccgccttggcctcccaaagtgctgggattacagacatgagccaccgtgcccggccttttttcttttcttttcttttcttttttaayatgagtgtgtggcagtgaagagctcagctactggtagagtttgctgtcatttcctttttccatactaagacaccagctgttgcccacattccttttgcca

SEQ ID NO: 12780 - DNA, 201 bp, Homo sapiens
ggattacagacatgagccaccgtgcccggccttttttcttttcttttcttttcttttttaatatgagtgtgtggcagtgaagagctcagctactggtagartttgctgtcatttcctttttccatactaagacaccagctgttgcccacattccttttgccatatcagtacaaatgtgaacatggtggaaaaaggcagtta

SEQ ID NO: 12781 - DNA, 201 bp, Homo sapiens
gtaaaatcaggctaaaataagcatgaaagcagcataaaggaggaagcatgtgtatggaagacaagttgggaagatcatctattttgtccttaataaccgtsggctgtgattatgagctgatcatgtccctgagggttttggtattttactcttgttttttgccagtacctgaaagagtcctatctttcttccgtactggtt

SEQ ID NO: 12782 - DNA, 201 bp, Homo sapiens
aaaataagcatgaaagcagcataaaggaggaagcatgtgtatggaagacaagttgggaagatcatctattttgtccttaataaccgtgggctgtgattatragctgatcatgtccctgagggttttggtattttactcttgttttttgccagtacctgaaagagtcctatctttcttccgtactggttccttatcccccga

SEQ ID NO: 12783 - DNA, 201 bp, Homo sapiens
aaaggaggaagcatgtgtatggaagacaagttgggaagatcatctattttgtccttaataaccgtgggctgtgattatgagctgatcatgtccctgagggwtttggtattttactcttgttttttgccagtacctgaaagagtcctatctttcttccgtactggttccttatcccccgaatcattaagtgctcagtgaaaa

SEQ ID NO: 12784 - DNA, 201 bp, Homo sapiens
ctgtaagaatgagtctgaactcacaaccaatgaatagtcgtaaacataaatgaaatcaaactttttttttgaaacagaaaagctaaatttaattgcatctmttgaccttcaataggtggtgaagttgatctaaagaaccaagtaacaccattggacatcttgtccaagactagagtgtcagaagataacattacagaatct

SEQ ID NO: 12785 - DNA, 201 bp, Homo sapiens
acatcttgtccaagactagagtgtcagaagataacattacagaatctcaacacatgctagtggctgaaatcatggtgtcaggtatgaataactagttctcmaatatacctttggttccaacagtttccatcctaccaatgagaaattttgaattacctttctaacttaatattgcctaagttctacacaaggctaatgaaa

SEQ ID NO: 12786 - DNA, 201 bp, Homo sapiens
aacaactttagggaacttaagtctttcttgttccatattcacctaggaggtcagtggtttttccagctgggttcagctcagccctagagcttctgcaaacmccatcctttcactttaggtcactgcccttcaagcagtgcaatttgactttgaaacattttatttgtttgtgttactaagtaacactttaacaagatgtat

SEQ ID NO: 12787 - DNA, 201 bp, Homo sapiens
caagcagtgcaatttgactttgaaacattttatttgtttgtgttactaagtaacactttaacaagatgtatgtggcaaaaaaaaaaaaggaaaatatttcraaactccacattaggacttttaaggagatgctttacccaacttttgtggtctgcaaactactttgttgatgtacgtggctctgggtacctcttacctcac

SEQ ID NO: 12788 - DNA, 201 bp, Homo sapiens
tcaccccatggaacccaggtatacaaaacatcaggcatcggtgtaggcaggtttcacatcccaccaataatactgatctgtgttcagttgaaaaaaatccrggtataagtggacctgtgcagttcaaacccgtgttgttcaagggtcaaccataatctctaatttgatcctcattacaaatcagttcacagatatgaaagc

SEQ ID NO: 12789 - DNA, 201 bp, Homo sapiens
caccccatggaacccaggtatacaaaacatcaggcatcggtgtaggcaggtttcacatcccaccaataatactgatctgtgttcagttgaaaaaaatccargtataagtggacctgtgcagttcaaacccgtgttgttcaagggtcaaccataatctctaatttgatcctcattacaaatcagttcacagatatgaaagca

SEQ ID NO: 12790 - DNA, 201 bp, Homo sapiens
ttctgtggcctgcttccctcatcctggccttgtttctaacagacatggacatgtgtgctagttgttttttcagcccatggtgtgtttcttagcccttcaamgtcctgtgtgtccttcgccctctggctcagaaagcctttcctagttcctgaccgggctagggctgcctattacagctctcttagaacctcacttctgccc

SEQ ID NO: 12791 - DNA, 201 bp, Homo sapiens
accaagtaaatcctgaatcatattctaatttaagataattctgcaagtgatttaaaacatcttgggtaatcggatactgtccactctacactctgagcagycttgtgatttgggagctagtcttccaaataaatgctgaattaaatggataattgatttggtctgatcttatccatctctaagagtcatgagtgacaggag

SEQ ID NO: 12792 - DNA, 201 bp, Homo sapiens
agtgacaggagataaccaagcaagcatgaaaggcatctgctcccacaagagaaatcttctcgctcaagtagctaagcaaatcaaatgcaattacccaatgkctgcattcacatgccacctgaatcctacttagatcatttaactttctttaatttatcggcaagtttggagggctttttaaaaaatctcttctgtactaag

SEQ ID NO: 12793 - DNA, 201 bp, Homo sapiens
tctcgctcaagtagctaagcaaatcaaatgcaattacccaatgtctgcattcacatgccacctgaatcctacttagatcatttaactttctttaatttatyggcaagtttggagggctttttaaaaaatctcttctgtactaagatgagcaagcttaccagtgaatagacagatgataaattatatcctactgtggtatgt

SEQ ID NO: 12794 - DNA, 201 bp, Homo sapiens
taagcaaatcaaatgcaattacccaatgtctgcattcacatgccacctgaatcctacttagatcatttaactttctttaatttatcggcaagtttggaggrctttttaaaaaatctcttctgtactaagatgagcaagcttaccagtgaatagacagatgataaattatatcctactgtggtatgtcagattcccccaact

SEQ ID NO: 12795 - DNA, 201 bp, Homo sapiens
ttgggggataagaatagattgactccttttgttgtcaaaatggttgggaagtttcaaaacaagcaacagacctttcaaatttgagtctatttgcttctagyaattttataatttacatttgcaaatgcttttaaaaattataaataagttcatatagggttccttgaacacaccagatagtgctttaaaactaaagttctt

SEQ ID NO: 12796 - DNA, 201 bp, Homo sapiens
gctatgggactttgggactatgcatctctttttttttctttttttgacagtgtctcactttgtcacccaggctggagtgcagtggcaccatcttgtctcayggccgcatcaacctcctgattctcctacctcagccccccaagtagctgggactatacaccagttttcagtagagacagagtttcaccatgttgcccaggc

SEQ ID NO: 12797 - DNA, 201 bp, Homo sapiens
tcactttgtcacccaggctggagtgcagtggcaccatcttgtctcacggccgcatcaacctcctgattctcctacctcagccccccaagtagctgggactrtacaccagttttcagtagagacagagtttcaccatgttgcccaggctggtctcgaactcctgggctcaagtaatccatcctcagcttcccaaagtgctgg

SEQ ID NO: 12798 - DNA, 201 bp, Homo sapiens
ttgtcacccaggctggagtgcagtggcaccatcttgtctcacggccgcatcaacctcctgattctcctacctcagccccccaagtagctgggactatacaycagttttcagtagagacagagtttcaccatgttgcccaggctggtctcgaactcctgggctcaagtaatccatcctcagcttcccaaagtgctgggatta

SEQ ID NO: 12799 - DNA, 201 bp, Homo sapiens
tctcgaactcctgggctcaagtaatccatcctcagcttcccaaagtgctgggattacaagcatgaaccactgcacccagccagctatggatcttttaatgyagtatagtttataggtcaactaagcgtttctatttggaggttaacctgtcccagaacttgggaaaggaagtggtggactgttctgtagaaccagaagatt

SEQ ID NO: 12800 - DNA, 201 bp, Homo sapiens
acaagcatgaaccactgcacccagccagctatggatcttttaatgcagtatagtttataggtcaactaagcgtttctatttggaggttaacctgtcccagmacttgggaaaggaagtggtggactgttctgtagaaccagaagattaaagtccgttttcttctctaaggtctagaaataactgcacgggattcttgctatt

SEQ ID NO: 12801 - DNA, 201 bp, Homo sapiens
tttttctgctctttctgactcaaaaactccagaaggatttatgtaatcagcagatttgaataagttatttgatgttagctaaaaaaaaaaattgaatgacmtgcatagaaaatgagacatataaatatatttacacaaatacattgagtttatagtaaaatttatggttacacaatatatgcagttgtcattaaggggaag

SEQ ID NO: 12802 - DNA, 201 bp, Homo sapiens
tcaagtttatgacttcaccaattccaatgaaaacacaacttttttttttttttttttaccccagaagcttaggtcataagttttagtcaaatgaatagatyaatggatgggttcctattttatattaatagcctcaaaattataatttaacgattgctggaaagatctcagtccttatggtctgaaactctggcagaaagt

SEQ ID NO: 12803 - DNA, 201 bp, Homo sapiens
ctaccaaggagatgggattcactgtcttggtaagaggacacatgtgctggggaggagggcagaggcaggcctcagaaatcgggaaacaatgtgggtgcatragcagagggaagacaggatataattggggtgacacacatgtcaagatttaaagagttgtgcgacctgctcaaactgacgtatttccattcttggtgaaca

SEQ ID NO: 12804 - DNA, 201 bp, Homo sapiens
agtttgtgcccttgtgttattactgccctagtcagcttcaagcccctttggaggctgtttactcctctgcctttctaattctttctggggtttgagtgacwccagtgtctcatcaatacttcccaccttgagccatcatggggggagttggacagcatttacttgtcagtgaatttggtaagagaaatgtggtgaactgca

SEQ ID NO: 12805 - DNA, 201 bp, Homo sapiens
catacgtttccaggtgtcagtagcatcgcatcacgtacaagtgaaaacctgcctgaagccgtctgaggcacggtgaagtgattatctgaagttttacagcrctttaaaacttctctttcagtattttctttccctccttctgaaaacctaagaaactgataagaagctcaaatgatactgctttctcccacttgctaaggt

SEQ ID NO: 12806 - DNA, 201 bp, Homo sapiens
tttaaatcagacctttattggattagttttgtggaatccacagacatctgtaaacactcttttaagcacatatttggctgtcagtcaggaaaatgtcactrctctaattaagcaggcccatagataatttagacaagctgatttcatatttaatttcctttgaagagaaaggaaggtatctcttcttggatgtttaaactc

SEQ ID NO: 12807 - DNA, 201 bp, Homo sapiens
ccacagacatctgtaaacactcttttaagcacatatttggctgtcagtcaggaaaatgtcactgctctaattaagcaggcccatagataatttagacaagmtgatttcatatttaatttcctttgaagagaaaggaaggtatctcttcttggatgtttaaactcgttaggctctggtttctcacactgttactaactcatc

SEQ ID NO: 12808 - DNA, 201 bp, Homo sapiens
agataatttagacaagctgatttcatatttaatttcctttgaagagaaaggaaggtatctcttcttggatgtttaaactcgttaggctctggtttctcacrctgttactaactcatctccttccagtatcgagcacgcaatggggtgtgctcaccctgcctgcatggttggcacggagtcctcaaactccatgaaagcagt

SEQ ID NO: 12809 - DNA, 201 bp, Homo sapiens
aaactcgttaggctctggtttctcacactgttactaactcatctccttccagtatcgagcacgcaatggggtgtgctcaccctgcctgcatggttggcacrgagtcctcaaactccatgaaagcagtgggcttgctcctctattctctctcccccagctcactcttactctctctccccgccccatatatatatgtagtta

SEQ ID NO: 12810 - DNA, 201 bp, Homo sapiens
aactccatgaaagcagtgggcttgctcctctattctctctcccccagctcactcttactctctctccccgccccatatatatatgtagttataatacttcraaccttgtctggcacataaaaagtgctatgtaaaattttatccttattattattaagagtagttgagtttcttggtcaagcatacttctttgtctttgct

SEQ ID NO: 12811 - DNA, 201 bp, Homo sapiens
tgggaaagaaaggatgacttttctgatatagtttattcttatataaaaagcaaaactgttgtatttgatataatatgtatgtcaatgacaggatgtctatwcaaaagagttaagtatgaatctttaggatctgaacttttaaatgtttgcctagaggttgtttattaatctccaactttgggaagtctcctttccttcaaa

SEQ ID NO: 12812 - DNA, 201 bp, Homo sapiens
ttgatataatatgtatgtcaatgacaggatgtctatacaaaagagttaagtatgaatctttaggatctgaacttttaaatgtttgcctagaggttgtttaytaatctccaactttgggaagtctcctttccttcaaagcaggaagaaagcttccagcctctctcaggagcttagaacacctgcatggggctgggtgtggtg

SEQ ID NO: 12813 - DNA, 201 bp, Homo sapiens
gaggccaggagtttgagacagcctgggcaacatagcgaaacactgttctccacaaaaaaaaaattaaaaacaaacaagcaaacaagaactaaccaatcatrgtgatgcaagcctgtggtccaagctacttggtgggttgagctggaagaattgcttgaccctaggaggtcaaggctacaatgagccatgatcacaccactg

SEQ ID NO: 12814 - DNA, 201 bp, Homo sapiens
tcatccttagcaaccaagcaagattctttaaaaaaaaaaaaaaaaaaaaaaaaaaaaaagacagagagagaaagaacggaaacaaaaaaggaaaacaacaygtgcatgggcatgcgttgtaggacctagttcatctctccaacattcatgaaagtccccttaaacctaaaaatgtatagggctgtgctcgctttggcagca

SEQ ID NO: 12815 - DNA, 201 bp, Homo sapiens
ggaaaacaacacgtgcatgggcatgcgttgtaggacctagttcatctctccaacattcatgaaagtccccttaaacctaaaaatgtatagggctgtgctcrctttggcagcacatatactaaaattggaatgatacagagaagattagcatggcccctgcgcaaggaggacatgcaaattcgtgaagcgttccatattttt

SEQ ID NO: 12816 - DNA, 201 bp, Homo sapiens
ttccatatttttaaagtcaggaaacaacaggtgctggagaggatatggacaaataggaacacttttacactgttggtgggactgtaaactagttcaacccytgtggaagatagtgtggtgattccttcagggatctagaactagaaataccatttgacccagccatcccattactgggtatatacccaaaggaatataaat

SEQ ID NO: 12817 - DNA, 201 bp, Homo sapiens
tactgggtatatacccaaaggaatataaatcatgcttctataaagacacatgcacacgtatgtttattgcagcactattcacaatagcaaagacttggaaycaacccaaatgtccaacaatgatagactggattaagaaaatgtggcacatatacaccatggaatactatgcaaccataaaaaatgatgagttcatgtcct

SEQ ID NO: 12818 - DNA, 201 bp, Homo sapiens
gaaaatgtggcacatatacaccatggaatactatgcaaccataaaaaatgatgagttcatgtcctttgtagggacatggatgaagctggaagccatcattstcagcaaactatcacaaggacaaaaaaccaaacactgcatgttcttactcataggtgggaattgaacaatgagaacacttggacacagggtggggaacat

SEQ ID NO: 12819 - DNA, 201 bp, Homo sapiens
ccatggaatactatgcaaccataaaaaatgatgagttcatgtcctttgtagggacatggatgaagctggaagccatcattctcagcaaactatcacaaggmcaaaaaaccaaacactgcatgttcttactcataggtgggaattgaacaatgagaacacttggacacagggtggggaacatcacacacaggggcctgttgt

SEQ ID NO: 12820 - DNA, 201 bp, Homo sapiens
accaaacactgcatgttcttactcataggtgggaattgaacaatgagaacacttggacacagggtggggaacatcacacacaggggcctgttgtggggtgvggggagggaggagggatagcattaggagatacacctaaaataaatgacgagttaatgggtgcagcacaccaacatggcacatgtatacatatgtaacaaa

SEQ ID NO: 12821 - DNA, 201 bp, Homo sapiens
tgcatgttcttactcataggtgggaattgaacaatgagaacacttggacacagggtggggaacatcacacacaggggcctgttgtggggtggggggagggrggagggatagcattaggagatacacctaaaataaatgacgagttaatgggtgcagcacaccaacatggcacatgtatacatatgtaacaaacctgcacct

SEQ ID NO: 12822 - DNA, 201 bp, Homo sapiens
gaattgaacaatgagaacacttggacacagggtggggaacatcacacacaggggcctgttgtggggtggggggagggaggagggatagcattaggagatayacctaaaataaatgacgagttaatgggtgcagcacaccaacatggcacatgtatacatatgtaacaaacctgcaccttgtgcatgtgaaccctagaactt

SEQ ID NO: 12823 - DNA, 201 bp, Homo sapiens
ttggacacagggtggggaacatcacacacaggggcctgttgtggggtggggggagggaggagggatagcattaggagatacacctaaaataaatgacgagytaatgggtgcagcacaccaacatggcacatgtatacatatgtaacaaacctgcaccttgtgcatgtgaaccctagaactttaagtataataaaaaatata

SEQ ID NO: 12824 - DNA, 201 bp, Homo sapiens
gttgtggggtggggggagggaggagggatagcattaggagatacacctaaaataaatgacgagttaatgggtgcagcacaccaacatggcacatgtatacrtatgtaacaaacctgcaccttgtgcatgtgaaccctagaactttaagtataataaaaaatatatattaaaaaaatatataggtctctgagaacatatagc

SEQ ID NO: 12825 - DNA, 201 bp, Homo sapiens
gaggagggatagcattaggagatacacctaaaataaatgacgagttaatgggtgcagcacaccaacatggcacatgtatacatatgtaacaaacctgcacsttgtgcatgtgaaccctagaactttaagtataataaaaaatatatattaaaaaaatatataggtctctgagaacatatagcatgacagaagctgatgaag

SEQ ID NO: 12826 - DNA, 201 bp, Homo sapiens
ggagatacacctaaaataaatgacgagttaatgggtgcagcacaccaacatggcacatgtatacatatgtaacaaacctgcaccttgtgcatgtgaacccyagaactttaagtataataaaaaatatatattaaaaaaatatataggtctctgagaacatatagcatgacagaagctgatgaagctcctcttccaaaggct

SEQ ID NO: 12827 - DNA, 201 bp, Homo sapiens
aacatggcacatgtatacatatgtaacaaacctgcaccttgtgcatgtgaaccctagaactttaagtataataaaaaatatatattaaaaaaatatatagstctctgagaacatatagcatgacagaagctgatgaagctcctcttccaaaggctgtccaactataaaaccctctttttctgtaccccacttttctctccc

SEQ ID NO: 12828 - DNA, 201 bp, Homo sapiens
aggttggtgggtggtctacagtgaaggggagggacttggctcggggatattctataccctaatctctatttgcattagagattctaaaaatcattcagttsaggcaggctgcagagctggctttcctgattaggacgatgctgggcttgagaatttgaaatggtccaagttttcttaatttaatagcatctggaataaatc

SEQ ID NO: 12829 - DNA, 201 bp, Homo sapiens
aaaggcagtatttcttgttctgaattagaactccagctctcttctctttcttttctcaatattcataatggttgactcctgcttcctgaatcttcttcccrtaacagcagtaacatctcaccatcagcaccccagaaggggagctggcttcacctagaccctggagaccaggatgggggtctttcccatcactgcccactt

SEQ ID NO: 12830 - DNA, 201 bp, Homo sapiens
atttatgtagtcagctgcacatgtttaccttttaaggagcagtgaaccattcaataaaagagactttactattatattttggcatgccctctgttacgggracattttcttcctgccagagttgctacagtcttgtccttgagggctcctctgaaggttagtttttagaagaaagcactgtgagaaaaaattttcgagact

SEQ ID NO: 12831 - DNA, 201 bp, Homo sapiens
tacgggaacattttcttcctgccagagttgctacagtcttgtccttgagggctcctctgaaggttagtttttagaagaaagcactgtgagaaaaaattttygagactccaggatattggaggtaacggactgcacattgatgggtaggttttaaaccatagagttaccagttgttcagtgagaccttgaagctaactgtca

SEQ ID NO: 12832 - DNA, 201 bp, Homo sapiens
ttaccagttgttcagtgagaccttgaagctaactgtcacttcacatggttagtgtatgtttgtgtgtgacaggtttgtttttatgagatcagtgactctgwattcacatggcgacttaggactgggtgttcttttacctgcctccaatatgctttatgtatcagataatactgagcccaaaggaagaacggctggtttcat

SEQ ID NO: 12833 - DNA, 201 bp, Homo sapiens
cttgggttcttttagactctactccaccccctcacctcagggaagatgaccaccactattccgtaagaaatagtgactctgaatgtcccctgtcccacgawgggtactgcctccatgatggtgtgtgcatgtatattgaagcattggacaagtatgcatgcaagtaagttaaactgtcttgctgatggcacagagagatgc

SEQ ID NO: 12834 - DNA, 201 bp, Homo sapiens
agtccataacttgtagctaatttgtaaaatttacactcaggatgtttttctgcaattaggtgttcttttggaaaaatataaacatacacatatgaaccacrtgtgtgcacttcattgcatgctccttgtgtatcacgatgcccccttctagttaccggtgataagtataaatctaaggagttggtgatttccccttttact

SEQ ID NO: 12835 - DNA, 201 bp, Homo sapiens
ttaggtgttcttttggaaaaatataaacatacacatatgaaccacgtgtgtgcacttcattgcatgctccttgtgtatcacgatgcccccttctagttacyggtgataagtataaatctaaggagttggtgatttccccttttactgaaataatttgatgttactactagtatagtctagggattaaatgtctcatcctgg

SEQ ID NO: 12836 - DNA, 201 bp, Homo sapiens
aatctaaggagttggtgatttccccttttactgaaataatttgatgttactactagtatagtctagggattaaatgtctcatcctggttgaaaaacttagrtttgtgagataattccttaaaactttttttttccatcaaatgtgctttatattatgtgtgagcatccgtgatctgtttctggatttacaaaagtttggta

SEQ ID NO: 12837 - DNA, 201 bp, Homo sapiens
agttgacttttacattttgttgttcagtaacaattgctgatactgcagctgctgctttttgctccctttttgcccccataagggtttcacagtgggtaacrtgtcaacctggaaaggagatttgaggaagccctaaaactatgagacattcccactgtgctcactccgaaaacctttcctgtggaccctttaacaaaaccc

SEQ ID NO: 12838 - DNA, 201 bp, Homo sapiens
tagctactataaccttaaagtcttctcttatttcatcagtaataatgaacagaataactaaatttgtggaagagtaagctatattctgtgacaaagtgtayggccttgcactagaaatcatgtccgcatgacaaaaatagtgaaaaattgctcatgaatactagtaaaaatgactcagtccttatagaattctgttttcat

SEQ ID NO: 12839 - DNA, 201 bp, Homo sapiens
gcttcatttacttcaaaaaagttcagcagttcactctagtgacagtttcactaatgggacagcagggtgtttgtaggtgaacgtccctttttcctccatayagctttttctctcattgaagaaaataggcaaatgcctgtatgtatgttgtactgggtcttcccttgcactagtagtgatttttttttttaaaggaaaaaa

SEQ ID NO: 12840 - DNA, 201 bp, Homo sapiens
gtttgtaggtgaacgtccctttttcctccatatagctttttctctcattgaagaaaataggcaaatgcctgtatgtatgttgtactgggtcttcccttgcrctagtagtgatttttttttttaaaggaaaaaagttttctctgcagactaggttatgtgttctgtttagaaactgtacacattcttcttttatagcctggt

SEQ ID NO: 12841 - DNA, 201 bp, Homo sapiens
tagctttttctctcattgaagaaaataggcaaatgcctgtatgtatgttgtactgggtcttcccttgcactagtagtgatttttttttttaaaggaaaaamgttttctctgcagactaggttatgtgttctgtttagaaactgtacacattcttcttttatagcctggtttcaagtgaggaactctgccttcaaattctcc

SEQ ID NO: 12842 - DNA, 201 bp, Homo sapiens
taggttatgtgttctgtttagaaactgtacacattcttcttttatagcctggtttcaagtgaggaactctgccttcaaattctcctttcctttcacctatrctcattgcaatctggccaaacatttgtttccaaaactcccttggctcttagggcagagttgctttgtgttggttttaaaaggtggctcctcaggatttta

SEQ ID NO: 12843 - DNA, 201 bp, Homo sapiens
atgtgttctgtttagaaactgtacacattcttcttttatagcctggtttcaagtgaggaactctgccttcaaattctcctttcctttcacctatactcatkgcaatctggccaaacatttgtttccaaaactcccttggctcttagggcagagttgctttgtgttggttttaaaaggtggctcctcaggattttagcctaa

SEQ ID NO: 12844 - DNA, 201 bp, Homo sapiens
ttcaaattctcctttcctttcacctatactcattgcaatctggccaaacatttgtttccaaaactcccttggctcttagggcagagttgctttgtgttggytttaaaaggtggctcctcaggattttagcctaacagaaactgatctttaatcaatgtcctgtaatgccttatagaggcagtatgcaaataatcccccata

SEQ ID NO: 12845 - DNA, 201 bp, Homo sapiens
ggagcgatgtcagtaccgagacctgaagtggtgggaactgcgccacgctggccacgggcagcagcagaaggtcatcgtggtggctgtctgcgtggtggtgyttgtcatgctgctcctcctgagcctgtggggggcccactactacaggtgaccctgtctttcctttggtactggaaacctctttctaagacctcccagggg

SEQ ID NO: 12846 - DNA, 201 bp, Homo sapiens
ggaaacctctttctaagacctcccaggggaatgcctgtctccttgagatgagatgtatgaaatagtacctctacatactacatttaaaacgtgaaataggstgggtgcagtgacccatgcctgcaatcccagcactttgggaggccgaggcaggcagatcacttgaggtcagaagttcgagaccagcctggccaacatggt

SEQ ID NO: 12847 - DNA, 201 bp, Homo sapiens
gaggccgaggcaggcagatcacttgaggtcagaagttcgagaccagcctggccaacatggtgaaaccccgtctccactaaaaaggcaaaaagtaacaggcrtagtgatgcacaccagtaatctcagctactcgggaggctgaggcatgagaattacttgaacttgggaggcaggggttgcagtgagccaagatcatgccac

SEQ ID NO: 12848 - DNA, 201 bp, Homo sapiens
atgcacaccagtaatctcagctactcgggaggctgaggcatgagaattacttgaacttgggaggcaggggttgcagtgagccaagatcatgccactccacyccagcatgggcgatagagcgagactccgtgtcaaaaaaaaaaaaaaaaaaaaggtgaaataacagtacaatttttactgttagctcaggatttcattgct

SEQ ID NO: 12849 - DNA, 201 bp, Homo sapiens
tgaaacatcagtgcttttacgttttccttgttccattccagtcattgtccatacaccttcatagtatatgtgttatttatcaatcacaatatggttttgcrttccactctctttgtttaatattatatgctccccccatagcctgcataactataatttttcattgctgccttccattgagttgattttccacaaaatatt

SEQ ID NO: 12850 - DNA, 201 bp, Homo sapiens
taacattgtaatttttagcctggtgtgtaatcaatatcttggatatgtgtagaaagaatattgaatgatcaatggttcatcccattggatcattgccaaarggcaggaaaaaaaaatggaaactagaaacttaagttcatgcgtgccataattattaagtgttttttcctatttgttgtgttatgatatagtatgtcttat

SEQ ID NO: 12851 - DNA, 201 bp, Homo sapiens
aagccgtgattgcaccactgctctccagcctgggtgacaaagcgagattctgtctcaaaaacaaaacaaaacaaaaaagactaatgtttgtgaaactaaakaaatttttcaagtattctaatcttattagtttaaaacatgtgatttcttggaaggactcccttgtaagaaaatcaacaggaagtatttcatcacaaagta

SEQ ID NO: 12852 - DNA, 201 bp, Homo sapiens
ggttgattccgtgtctttgccattgcgaacagtgctgctgtgatcattgacatccatgtgtctttatggtagaatgatttatattcctctgggtatatacscagtaatggaattgctgggtcaaatggtagttctgcagttaactctttgaagcatcaccgtaccgctttccataatgattgaaataatttcctctctctc

SEQ ID NO: 12853 - DNA, 201 bp, Homo sapiens
gaacagtgctgctgtgatcattgacatccatgtgtctttatggtagaatgatttatattcctctgggtatatacccagtaatggaattgctgggtcaaatkgtagttctgcagttaactctttgaagcatcaccgtaccgctttccataatgattgaaataatttcctctctctccaacagtgtataagtgtttccttttc

SEQ ID NO: 12854 - DNA, 201 bp, Homo sapiens
tttgcaactttggaattgtttatattagccacttgtttcaatttttttccttgaagcctttgattaaaacacataataacccacaccatctcttggtactstctgtgatgccagattcacagcagcccctcctatccttatcactcttcctggaacgtccaggtagggcttttgacagagggttgcattcctagaggcaat

SEQ ID NO: 12855 - DNA, 201 bp, Homo sapiens
aacacataataacccacaccatctcttggtactgtctgtgatgccagattcacagcagcccctcctatccttatcactcttcctggaacgtccaggtaggscttttgacagagggttgcattcctagaggcaattaagctgcctatctgccccaggacagtggcgttattgtggagtctcacagatgcactgctctagggg

SEQ ID NO: 12856 - DNA, 201 bp, Homo sapiens
ccacaccatctcttggtactgtctgtgatgccagattcacagcagcccctcctatccttatcactcttcctggaacgtccaggtagggcttttgacagagsgttgcattcctagaggcaattaagctgcctatctgccccaggacagtggcgttattgtggagtctcacagatgcactgctctaggggctactgctttgag

SEQ ID NO: 12857 - DNA, 201 bp, Homo sapiens
tattgtggagtctcacagatgcactgctctaggggctactgctttgaggatggggatccatctccatgctaaatctccccacccccacccctagtgaatgwcgccgtgtatagacttagcgttgaatgtcaaacaagacagtactctaaaaaactggatttggaagcaagatacctagtgtatttcctggcttagccacta

SEQ ID NO: 12858 - DNA, 201 bp, Homo sapiens
agccccaatggcttcacttgtaaatggagctaacatagtctgcctcacacagttgctgagatattttttccacagactgccccactcctccctgcaaaatyagttgttttttcattgctatatcatcagtactaggacagtgcctggggtatagttagtactcaatagatacctgtgaatgaatgaatgcaaggctattcc

SEQ ID NO: 12859 - DNA, 201 bp, Homo sapiens
ttttttcattgctatatcatcagtactaggacagtgcctggggtatagttagtactcaatagatacctgtgaatgaatgaatgcaaggctattccccccarcatacatgggcatacatacacacacacacacacacacacacacacacacacacacaaacacacacacaccctctacctcacagaaccttggaaagagtga

SEQ ID NO: 12860 - DNA, 201 bp, Homo sapiens
tgggcatacatacacacacacacacacacacacacacacacacacacacaaacacacacacaccctctacctcacagaaccttggaaagagtgaaacactrtctggaaagcattttgagttctgcagaaaagactgccttaaacatctaaagttatgttcctagttatcttcatatttcttctctcccacacaagtactta

SEQ ID NO: 12861 - DNA, 201 bp, Homo sapiens
tacacacacacacacacacacacacacacacacacacacaaacacacacacaccctctacctcacagaaccttggaaagagtgaaacactgtctggaaagyattttgagttctgcagaaaagactgccttaaacatctaaagttatgttcctagttatcttcatatttcttctctcccacacaagtacttaaattttagta

SEQ ID NO: 12862 - DNA, 201 bp, Homo sapiens
gaaaagactgccttaaacatctaaagttatgttcctagttatcttcatatttcttctctcccacacaagtacttaaattttagtagcaaaagcagttagtygtccctgatcatcactgagtgggctgagtattttgttttgttgtgagattgtctcaaattttggctttatcacaggactcagaagctgctatcgaaaaac

SEQ ID NO: 12863 - DNA, 201 bp, Homo sapiens
ctgtgttgttaactaaaggaatcagatgagttataataatgccataatttaatggcacaataaatttttggaatttttttctttcatgtagattctttctrtaacttagatttgtatgtgttatgtgaaggctttccatatttttagttaatacattccagatacatgtcttaaaaacccaagattgtgcttctaatttat

SEQ ID NO: 12864 - DNA, 201 bp, Homo sapiens
catatttttagttaatacattccagatacatgtcttaaaaacccaagattgtgcttctaatttattttctttctttctttcttttctttttctttttctcygtcttttttttttttttttttttttttggacaggatcttgctctgttgcccaggctggagtgcagtaatccaaccactcactgctcactgcagcctcgaa

SEQ ID NO: 12865 - DNA, 201 bp, Homo sapiens
tttttagttaatacattccagatacatgtcttaaaaacccaagattgtgcttctaatttattttctttctttctttcttttctttttctttttctctgtcytttttttttttttttttttttttggacaggatcttgctctgttgcccaggctggagtgcagtaatccaaccactcactgctcactgcagcctcgaactcc

SEQ ID NO: 12866 - DNA, 201 bp, Homo sapiens
ccgccacgcccagctaatttttgtattttttgtagagacagagtttcaccatgtttcccaggctggtctcaaactcttgggctcaagcaatccacctgccygggcctctcaaagtgctggaattgcaggcatgagccactgcactcaattttcttaattttcttaatatttcttaatatttcttttattttcttaatattt

SEQ ID NO: 12867 - DNA, 201 bp, Homo sapiens
atatgggcaaagagattgttttctactcctctttctgttgtttctgagttgtgtgctcctttctgtggagcgcccatttctgaaccaatgaagcgtgatcrgccaaaaccttggggcagtccttgcactagttactgattgacaaggaaggacttcaccaaatgatgtcctttgtcctgttgtatggggtcacttcttttc

SEQ ID NO: 12868 - DNA, 201 bp, Homo sapiens
aatgacaaaagtaatcattttgttgactgaagagaaatgttgttttctgttccttcctattaaaattctaggtccctaggctgttcaaccagcttgcaaawttgtcattgcactggtaattattactacctttaatggccccaaattactcagaacttggtagcatgtttaaatgagtgttattaatgtgtgtgtgcgtgt

SEQ ID NO: 12869 - DNA, 201 bp, Homo sapiens
gtccctaggctgttcaaccagcttgcaaaattgtcattgcactggtaattattactacctttaatggccccaaattactcagaacttggtagcatgtttaratgagtgttattaatgtgtgtgtgcgtgtgtgtgtatgaaaagttgtagcacacacatatattagatattatttgcctggcctatgggcagttcttagaa

SEQ ID NO: 12870 - DNA, 201 bp, Homo sapiens
aaaattgtcattgcactggtaattattactacctttaatggccccaaattactcagaacttggtagcatgtttaaatgagtgttattaatgtgtgtgtgcrtgtgtgtgtatgaaaagttgtagcacacacatatattagatattatttgcctggcctatgggcagttcttagaatacttatggattcttggattgcttat

SEQ ID NO: 12871 - DNA, 201 bp, Homo sapiens
ctcagaacttggtagcatgtttaaatgagtgttattaatgtgtgtgtgcgtgtgtgtgtatgaaaagttgtagcacacacatatattagatattatttgcstggcctatgggcagttcttagaatacttatggattcttggattgcttatggtaaatcagtggctccagggatccgtgacctaaaagctgagattccataa

SEQ ID NO: 12872 - DNA, 201 bp, Homo sapiens
atgaaaagttgtagcacacacatatattagatattatttgcctggcctatgggcagttcttagaatacttatggattcttggattgcttatggtaaatcastggctccagggatccgtgacctaaaagctgagattccataattagaatagattcttcagttaacatattggtgtgcctagttgctttaagacaaagtaac

SEQ ID NO: 12873 - DNA, 201 bp, Homo sapiens
tgggcagttcttagaatacttatggattcttggattgcttatggtaaatcagtggctccagggatccgtgacctaaaagctgagattccataattagaatwgattcttcagttaacatattggtgtgcctagttgctttaagacaaagtaacacaaggctcctcactgaatgttgaatctctctttagatagaaagactaa

SEQ ID NO: 12874 - DNA, 201 bp, Homo sapiens
gtttgtggttataaaagaacaccaagacctcaagaatgggggtcaaccagtggctggtgaggatggccaggcagcagatggtcagtttttatccctggctyctggtgaatggttatttttacttagatcctgactgtttttcaatgaaaagtctcatttaaccacacacacacacacaaacaaaataactaaattgtataa

SEQ ID NO: 12875 - DNA, 201 bp, Homo sapiens
gactgtttttcaatgaaaagtctcatttaaccacacacacacacacaaacaaaataactaaattgtataagctatgtgaatagctgggctgtattgaaatrccatggacctgatttgcactggagttctatcttatatgaggttaccacgttcactcaaaactctagtcacagggcagcccgtgttcttgcactttgagca

SEQ ID NO: 12876 - DNA, 201 bp, Homo sapiens
tataagctatgtgaatagctgggctgtattgaaatgccatggacctgatttgcactggagttctatcttatatgaggttaccacgttcactcaaaactctmgtcacagggcagcccgtgttcttgcactttgagcaagaacacaatggatgactccttgatttgaattgagttttggggtcattcttaaggtccaggatct

SEQ ID NO: 12877 - DNA, 201 bp, Homo sapiens
tgcactggagttctatcttatatgaggttaccacgttcactcaaaactctagtcacagggcagcccgtgttcttgcactttgagcaagaacacaatggatractccttgatttgaattgagttttggggtcattcttaaggtccaggatctatactggtagctgtaggtatagtcccagttaagttgtaaatggctccaag

SEQ ID NO: 12878 - DNA, 201 bp, Homo sapiens
aacccaggttctcaggaactcagtctacttcagatagaaatgaactcagatacccttaagagttgtattatgatcagccttttggttttgggtctcaggtwgagttttgtttcacaggccagaggacattgtttcacaggcctttgtgtcgtgagcctttggaaaggtttagagaaacttttagccaacaaaaacagctcc

SEQ ID NO: 12879 - DNA, 201 bp, Homo sapiens
actcagtctacttcagatagaaatgaactcagatacccttaagagttgtattatgatcagccttttggttttgggtctcaggttgagttttgtttcacagrccagaggacattgtttcacaggcctttgtgtcgtgagcctttggaaaggtttagagaaacttttagccaacaaaaacagctcctctgctaatgaaaggag

SEQ ID NO: 12880 - DNA, 201 bp, Homo sapiens
gtattatgatcagccttttggttttgggtctcaggttgagttttgtttcacaggccagaggacattgtttcacaggcctttgtgtcgtgagcctttggaarggtttagagaaacttttagccaacaaaaacagctcctctgctaatgaaaggagctaatgaaatatcaactccaattgaattttctatatttttccttctt

SEQ ID NO: 12881 - DNA, 201 bp, Homo sapiens
gacattgtttcacaggcctttgtgtcgtgagcctttggaaaggtttagagaaacttttagccaacaaaaacagctcctctgctaatgaaaggagctaatgraatatcaactccaattgaattttctatatttttccttcttcaatgtgcttattatcataacctcctcctcagatttctttctggaaagaacataggcttc

SEQ ID NO: 12882 - DNA, 201 bp, Homo sapiens
tagccaacaaaaacagctcctctgctaatgaaaggagctaatgaaatatcaactccaattgaattttctatatttttccttcttcaatgtgcttattatcrtaacctcctcctcagatttctttctggaaagaacataggcttcttgttttggaaaactcactctaaattcccttctcatacctatgttgccatgaaaccc

SEQ ID NO: 12883 - DNA, 201 bp, Homo sapiens
tggtaacccactatagaggcacatataatgtaattttgcaagctaatagcacaacgattttacaggaatttggttaaacttagaaaagaactaaggactcrttacagttagctgagtactcaggaatatattagaatgtctcttttgctgttgtttttttccccccgcactgtactgcaaacaatttgacccattctctgt

SEQ ID NO: 12884 - DNA, 201 bp, Homo sapiens
aatttggttaaacttagaaaagaactaaggactcattacagttagctgagtactcaggaatatattagaatgtctcttttgctgttgtttttttccccccrcactgtactgcaaacaatttgacccattctctgtgggccactcatataactatctcccagcatgagtgatcacatccccaatcatgtccagctgtctcat

SEQ ID NO: 12885 - DNA, 201 bp, Homo sapiens
gtggctcacacctgtaatccgagcactttgggaggccaaggtgggcagatcatttgaggtcaggagtttgagaccagcctgtctctaccaaatgagaccarcctgtctctatggtggaacgctgtctctaccaaaaagtacaaaaattagcctggcatgctggtgcacacctgtagtcccagctactcaggaggctgaggt

SEQ ID NO: 12886 - DNA, 201 bp, Homo sapiens
gtagtcccagctactcaggaggctgaggtaggaggatcccttgagcctgggagatggaggttgcagtgagctgagatctcaacactgcactccagtgagaytccatctcaaaacaaagatagagactccatctcaaaaacaaaaaacaaaaaacctgagctctatctactctcaagtcatttgtggtccagatggggagac

SEQ ID NO: 12887 - DNA, 201 bp, Homo sapiens
agcctgggagatggaggttgcagtgagctgagatctcaacactgcactccagtgagactccatctcaaaacaaagatagagactccatctcaaaaacaaawaacaaaaaacctgagctctatctactctcaagtcatttgtggtccagatggggagacagaagtacacagtaaaagctaaagagcaatgtgtcaggttctt

SEQ ID NO: 12888 - DNA, 201 bp, Homo sapiens
actctcaagtcatttgtggtccagatggggagacagaagtacacagtaaaagctaaagagcaatgtgtcaggttctttaaatcacctcaaccaagactatkgtaatttttttaaaaaaattttaagatgccaaccaagactattttaatttttaaaaaattattttaagtcaaggtcctactctgtcactcaggctaaagt

SEQ ID NO: 12889 - DNA, 201 bp, Homo sapiens
tttgtggtccagatggggagacagaagtacacagtaaaagctaaagagcaatgtgtcaggttctttaaatcacctcaaccaagactattgtaatttttttwaaaaaattttaagatgccaaccaagactattttaatttttaaaaaattattttaagtcaaggtcctactctgtcactcaggctaaagtacagtggcttgg

SEQ ID NO: 12890 - DNA, 201 bp, Homo sapiens
aagactattgtaatttttttaaaaaaattttaagatgccaaccaagactattttaatttttaaaaaattattttaagtcaaggtcctactctgtcactcargctaaagtacagtggcttggtcatggctcattgctgtcttggcctccccaggctcaagcaatcctcccacctcagcctcctaagtagctgagaccacagg

SEQ ID NO: 12891 - DNA, 201 bp, Homo sapiens
gcaagccatcctcccacttcagcctctcaaagtgctggagttacaaacatgagcccctgcactggcctattttaattttttaaaaattgggctcagggtgkggtgtggtgtctcatacctgtaattctagcactttgtgaggttgaggtgggcgaatcgcttgagcccaggagttcaaaaccagcctggctaacatggcaa

SEQ ID NO: 12892 - DNA, 201 bp, Homo sapiens
atcctcccacttcagcctctcaaagtgctggagttacaaacatgagcccctgcactggcctattttaattttttaaaaattgggctcagggtggggtgtgktgtctcatacctgtaattctagcactttgtgaggttgaggtgggcgaatcgcttgagcccaggagttcaaaaccagcctggctaacatggcaaccctgtc

SEQ ID NO: 12893 - DNA, 201 bp, Homo sapiens; identical to SEQ ID NO: 1403

SEQ ID NO: 12894 - DNA, 201 bp, Homo sapiens; identical to SEQ ID NO: 1405

SEQ ID NO: 12895 - DNA, 201 bp, Homo sapiens; identical to SEQ ID NO: 1406

SEQ ID NO: 12896 - DNA, 201 bp, Homo sapiens
gtttttcgttttttttttttttccggagagaggataggatctcactctgttatccaggctggagtgtgcaatggcacaatcatagctcagtgcagcctcaractcctgggctcaagcaatcctcctgcctcagcctcccgagtaactaggaccacaggcacaggccaccatgcctggctaaggtttttatttttatttttt

SEQ ID NO: 12897 - DNA, 201 bp, Homo sapiens
cacaatgttgcccaggctggtcttgaactcctggcctcaagcaaggtcgtgctggtaattttgcaaaatgaattgtgattgactttcagcctcccaacgtrttagattataggcattagccatggtgcccagccttgtaacttttaaaaaaattttttaatctacaactctgtagattaaaatttcacatggtgttctaat

SEQ ID NO: 12898 - DNA, 201 bp, Homo sapiens
ttgaactcctggcctcaagcaaggtcgtgctggtaattttgcaaaatgaattgtgattgactttcagcctcccaacgtattagattataggcattagccayggtgcccagccttgtaacttttaaaaaaattttttaatctacaactctgtagattaaaatttcacatggtgttctaattaaatatttttcttgcagccaa

SEQ ID NO: 12899 - DNA, 201 bp, Homo sapiens
ggtcgtgctggtaattttgcaaaatgaattgtgattgactttcagcctcccaacgtattagattataggcattagccatggtgcccagccttgtaactttwaaaaaaattttttaatctacaactctgtagattaaaatttcacatggtgttctaattaaatatttttcttgcagccaagatattgttactacagataaca

SEQ ID NO: 12900 - DNA, 201 bp, Homo sapiens
ttgcagccaagatattgttactacagataacacaacctgatatggtaactttaaattttgggggctttgaatcattcagtttatgcattaactagtccctytgtttatctttcatttctcaaccccttgtactttggtgataccagacatcagaataaaaagaaattgaagtacctgttttcaaatggatactttatagga

SEQ ID NO: 12901 - DNA, 201 bp, Homo sapiens
aataaaaagaaattgaagtacctgttttcaaatggatactttataggaattttggtaaagatttggtgatgggaggatgacttgaggtttgtggatattasttaattattcagtatgatacctcacccagctaatttagatttttctatattcggttttgctttcattgacaatatcctggaggatcagaagacttgtcta

SEQ ID NO: 12902 - DNA, 201 bp, Homo sapiens
accataatttcccccaaggttttctttacctaagtgtgaatattttttcttcctccaaaagctcacttttgggtttagattaaatttttgtattttagcamctttttcttttaggggttcaatgatgacaaaagaaatgacatgagaacacggctacccataacataccattatctttgtaccagaaaaatccttgtttcc

SEQ ID NO: 12903 - DNA, 201 bp, Homo sapiens
atttcccccaaggttttctttacctaagtgtgaatattttttcttcctccaaaagctcacttttgggtttagattaaatttttgtattttagcaccttttycttttaggggttcaatgatgacaaaagaaatgacatgagaacacggctacccataacataccattatctttgtaccagaaaaatccttgtttccttctta

SEQ ID NO: 12904 - DNA, 201 bp, Homo sapiens
accttagaaactgggaccctgctaagtccttgactaggctatctaccagctcctggtcggattaaagaaaaaacacactttgtgttttttaatcaccaagscaccctgcagagatatcttcttcttgcaacttcacatctttatcagtaatgtcctctttcctttaaaaattcaagttttaagaacagcattttcatgtaa

SEQ ID NO: 12905 - DNA, 201 bp, Homo sapiens
cctctttcctttaaaaattcaagttttaagaacagcattttcatgtaaaaacttgatttgtgttttttccagactgaatacttttcctccctaactctcaycgtctcattgcgcgcaatgcctgattgagcttctgtttgactaaatatcacctactatgtaaaaaatgagcatattggcctcttttctagcatctaataa

SEQ ID NO: 12906 - DNA, 201 bp, Homo sapiens
ctctttcctttaaaaattcaagttttaagaacagcattttcatgtaaaaacttgatttgtgttttttccagactgaatacttttcctccctaactctcatsgtctcattgcgcgcaatgcctgattgagcttctgtttgactaaatatcacctactatgtaaaaaatgagcatattggcctcttttctagcatctaataaa

SEQ ID NO: 12907 - DNA, 201 bp, Homo sapiens
cttttcctccctaactctcatcgtctcattgcgcgcaatgcctgattgagcttctgtttgactaaatatcacctactatgtaaaaaatgagcatattggcytcttttctagcatctaataaaggcttaatacactgtactcttttgaaaccatatgattccagtccaactattagccttgatttctaactgatgttctttt

SEQ ID NO: 12908 - DNA, 201 bp, Homo sapiens
actaaatatcacctactatgtaaaaaatgagcatattggcctcttttctagcatctaataaaggcttaatacactgtactcttttgaaaccatatgattcyagtccaactattagccttgatttctaactgatgttcttttcatgagaataactgattattgtgtgatctttgaaaatgtaatagcagcactaaattataa

SEQ ID NO: 12909 - DNA, 201 bp, Homo sapiens
tcatgagaataactgattattgtgtgatctttgaaaatgtaatagcagcactaaattataaatccttaaaaaacacacatacacatgcaaccaaaaccaayaaaaggctgaaagaaacagaaaatatctagtcaatttaagtagctgtgacaggcaagattttatggtttgctttgttttcttttactttttatttcctct

SEQ ID NO: 12910 - DNA, 201 bp, Homo sapiens
caatttaagtagctgtgacaggcaagattttatggtttgctttgttttcttttactttttatttcctctttattctttaagtctttacatgagaaaccctwttccgcattggttcattctgaagcaggaattccaaactttcctgtttggaacttgacagggtttctgtagctagaggccatatgctagcaacaaggaaaa

SEQ ID NO: 12911 - DNA, 201 bp, Homo sapiens
agtagctgtgacaggcaagattttatggtttgctttgttttcttttactttttatttcctctttattctttaagtctttacatgagaaaccctattccgcrttggttcattctgaagcaggaattccaaactttcctgtttggaacttgacagggtttctgtagctagaggccatatgctagcaacaaggaaaacaccagg

SEQ ID NO: 12912 - DNA, 201 bp, Homo sapiens
gtagctgtgacaggcaagattttatggtttgctttgttttcttttactttttatttcctctttattctttaagtctttacatgagaaaccctattccgcaytggttcattctgaagcaggaattccaaactttcctgtttggaacttgacagggtttctgtagctagaggccatatgctagcaacaaggaaaacaccaggc

SEQ ID NO: 12913 - DNA, 201 bp, Homo sapiens
atgtaaaccatggaaaacaggtgtggagattctttaaaaactaaaagtaagtctaccatttgatgtagcaattccactccttggtatctacccagatgaaraaaagtcattatacaaaaaagacacttgtacacacatgcttgtagcagcacaatttgcaattgcaaaaatatggaaccagcccaaatgcccatcaatcaa

SEQ ID NO: 12914 - DNA, 201 bp, Homo sapiens
ccatttgatgtagcaattccactccttggtatctacccagatgaaaaaaagtcattatacaaaaaagacacttgtacacacatgcttgtagcagcacaatytgcaattgcaaaaatatggaaccagcccaaatgcccatcaatcaacaagtggataaagaaaatgtggtacatatataccatggaataccagtcagccata

SEQ ID NO: 12915 - DNA, 201 bp, Homo sapiens
aagtgggagctaagctatgagtacacaaaggcataagaatgatacaaaggactttggggacctgggggaagtgtgggaaggatatgaggcataaaagactrcacattgggtacagtgtacactgctcaggtgcaccagaatctcagaaatcaccactaaagaacttattcatgtaaccaaacaccacctcttccccaaaaa

SEQ ID NO: 12916 - DNA, 201 bp, Homo sapiens
ggccaatgtgggaggattgcttgaagccaggagtttgagaccagcctgggcaacatagtgagacctccatctccacaaaaagtaaaaatactagccagacrtggtggtgtgcacttataatcctagctacttgacggactgaggcaagaggattgcttgaaatttgatgttacaatgagctatgattgtgccactatactc

SEQ ID NO: 12917 - DNA, 201 bp, Homo sapiens
atcatttcatgtttgtcttcatatcattctctccactccactccactgacacagcgtgatgcttgattgtcctctaagccccttccattgctgtcatctgrgatgctggcaatgtattgtgctgaaagggaagcttattaataaagttagtaactcgaagagtcagtgcaggttatttgtaggatgctcattatgagtctt

SEQ ID NO: 12918 - DNA, 201 bp, Homo sapiens
tgatgcttgattgtcctctaagccccttccattgctgtcatctgggatgctggcaatgtattgtgctgaaagggaagcttattaataaagttagtaactcraagagtcagtgcaggttatttgtaggatgctcattatgagtcttgagtctgactcagtccagaaagcaatggaatattccgcataaccacctaaaggact

SEQ ID NO: 12919 - DNA, 201 bp, Homo sapiens
ataatcaggacataattaagtatgagtaaaaggcttagagttagtctgttctcctctgtaatggggtgttcactagtgtgacagttgtttttgtgactatygcttttacgtacatttttgaccagcacttggaacactacctcagggtaacttaaatgaaagtccattttccaggatggagtaaactgacagaaatttcca

SEQ ID NO: 12920 - DNA, 201 bp, Homo sapiens
tgactattgcttttacgtacatttttgaccagcacttggaacactacctcagggtaacttaaatgaaagtccattttccaggatggagtaaactgacagamatttccatcgtgcatcaaatctgctataagttgtttgccttctgggtatttttgggccctagttgtactcctgaagaaataaccactgttgctccaagta

SEQ ID NO: 12921 - DNA, 201 bp, Homo sapiens
tacgtacatttttgaccagcacttggaacactacctcagggtaacttaaatgaaagtccattttccaggatggagtaaactgacagaaatttccatcgtgyatcaaatctgctataagttgtttgccttctgggtatttttgggccctagttgtactcctgaagaaataaccactgttgctccaagtagaaagtggttgag

SEQ ID NO: 12922 - DNA, 201 bp, Homo sapiens
aacactacctcagggtaacttaaatgaaagtccattttccaggatggagtaaactgacagaaatttccatcgtgcatcaaatctgctataagttgtttgcyttctgggtatttttgggccctagttgtactcctgaagaaataaccactgttgctccaagtagaaagtggttgaggagacagctaacagatacgtccagtt

SEQ ID NO: 12923 - DNA, 201 bp, Homo sapiens
ccaagtagaaagtggttgaggagacagctaacagatacgtccagttcttattttctatcacagagatgtgaaaaaaaaaaagcctaaattatcttagaagkaaaagcattcctctgtgctggatttccagtgcttcccagctttgcactgttagcttattttttccaatgtccctataataacaatccactcctttctctg

SEQ ID NO: 12924 - DNA, 201 bp, Homo sapiens
gaggagacagctaacagatacgtccagttcttattttctatcacagagatgtgaaaaaaaaaaagcctaaattatcttagaaggaaaagcattcctctgtrctggatttccagtgcttcccagctttgcactgttagcttattttttccaatgtccctataataacaatccactcctttctctgcactcctggcccctcgt

SEQ ID NO: 12925 - DNA, 201 bp, Homo sapiens
attttctatcacagagatgtgaaaaaaaaaaagcctaaattatcttagaaggaaaagcattcctctgtgctggatttccagtgcttcccagctttgcactrttagcttattttttccaatgtccctataataacaatccactcctttctctgcactcctggcccctcgtgatgttttatcatgctcatgctgaaagaaaag

SEQ ID NO: 12926 - DNA, 201 bp, Homo sapiens
ccagctttgcactgttagcttattttttccaatgtccctataataacaatccactcctttctctgcactcctggcccctcgtgatgttttatcatgctcawgctgaaagaaaaggtgtctgtccatactgtatctcttcatttggcctcagggatttccctttgatttggaaagaataatctttcaaattccgctataaac

SEQ ID NO: 12927 - DNA, 201 bp, Homo sapiens
aggagaaagagaaaaataagataaagctcctggaatgtgcactggtattgacatttcgttcaaataatgggctgaaggtgaactatctttactattgctcwtgtgaatgatcaattattatcaatccaaactatcaacagtgctgcttattattgatttatactgcatggtttaattttgtctccatccttccagacatta

SEQ ID NO: 12928 - DNA, 201 bp, Homo sapiens
gaactatctttactattgctcatgtgaatgatcaattattatcaatccaaactatcaacagtgctgcttattattgatttatactgcatggtttaattttktctccatccttccagacattaaaacatagccaatatttagcagttcccgccattcaccatgagcacctccacagcccccaactcctctctcccagttctg

SEQ ID NO: 12929 - DNA, 201 bp, Homo sapiens
ttctgcccaggatatttatggtgagtagcgagttatctcctctttggcagtcatccctgctttcctgtgtggaggaattgcccacattcgcatttgcaaayagaggctcactcaagtgtcactaaaggaaaggaggtggagcctgaagagctttaaaaagcaaagctgagtcattccacttttcaaaaagagaaactgttg

SEQ ID NO: 12930 - DNA, 201 bp, Homo sapiens; identical to SEQ ID NO: 1378

SEQ ID NO: 12931 - DNA, 201 bp, Homo sapiens; identical to SEQ ID NO: 1379

SEQ ID NO: 12932 - DNA, 201 bp, Homo sapiens
catgctccagcaaaatcaagctgttttcttttgaaagttcaaactcatcaagattatgctgctcactcttatcattctgttgccagtagtttcaaaatttmgttttgttagtctctcagcaccgcagcactggagctgtcctgaaggtactctcgcaggaaatgggaattctacttgtgtgggtaagtactccaatgaaaa

SEQ ID NO: 12933 - DNA, 201 bp, Homo sapiens
ctctcgcaggaaatgggaattctacttgtgtgggtaagtactccaatgaaaaggtgctccaggtctccgggaaactgcccccacatccctgttggttcaawctggtatacttgggcatttaacaaagtttgtctttgggtatgtatagttgcttaatttttgttttctgatgcatgtttattttcttactggccattagag

SEQ ID NO: 12934 - DNA, 201 bp, Homo sapiens
tgggtaagtactccaatgaaaaggtgctccaggtctccgggaaactgcccccacatccctgttggttcaatctggtatacttgggcatttaacaaagtttrtctttgggtatgtatagttgcttaatttttgttttctgatgcatgtttattttcttactggccattagagctaatctgctaccaactataaaacttcata

SEQ ID NO: 12935 - DNA, 201 bp, Homo sapiens
actccaatgaaaaggtgctccaggtctccgggaaactgcccccacatccctgttggttcaatctggtatacttgggcatttaacaaagtttgtctttgggyatgtatagttgcttaatttttgttttctgatgcatgtttattttcttactggccattagagctaatctgctaccaactataaaacttcataactctcaaa

SEQ ID NO: 12936 - DNA, 201 bp, Homo sapiens
ctataaaacttcataactctcaaactgtacttctgtgtataagtgaatgaatatgcctcattttaaactagcagaacatttcatggaagcttcagcttttrctctgacaagaggagtaattaacacctggctaattgcttggaaattagggaaacagatggttgattttttgtttgtctgtttgaaactcttaagccacaa

SEQ ID NO: 12937 - DNA, 201 bp, Homo sapiens
aacagatggttgattttttgtttgtctgtttgaaactcttaagccacaaagaaaaaaatccttccttctgataacttgtaagaattcagaagttctaaaawttagtgaaaaatggaaagggaactgtgaacaaaggtagttgtgaaaattaacctaaatttcaatttcaacctccttcactttctccccactcttactgtt

SEQ ID NO: 12938 - DNA, 201 bp, Homo sapiens
ctgtgaacaaaggtagttgtgaaaattaacctaaatttcaatttcaacctccttcactttctccccactcttactgtttctgaggctctgacacaactccrgagttttagtaacaggtgtattgcaactttaagaactgccaaatatgataatgggtaaataagccacactgtcctctcatattaaatgaattttttgcca

SEQ ID NO: 12939 - DNA, 201 bp, Homo sapiens
ctttaagaactgccaaatatgataatgggtaaataagccacactgtcctctcatattaaatgaattttttgccaaggggaaatgggagcttgactgaatgygaattacaatcctgccaaaggatattgcctgaaaaacattctctctctaactgttaattcatttatttaatccttgggtgagcctccaacctgctgctta

SEQ ID NO: 12940 - DNA, 201 bp, Homo sapiens
gaatgaggcgtctttctctgatctgctaatgacatagtcctagagaacagcaacaaaaagagggtgacaaatgacaaaaatggccccatgaacctcagackcagctgttggagacagaagtaaaacttctgtatacagttatgtcaaatggactggactctctttggggtgggagaattttccgtggagtagttggcaaat

SEQ ID NO: 12941 - DNA, 201 bp, Homo sapiens
aacagcaacaaaaagagggtgacaaatgacaaaaatggccccatgaacctcagactcagctgttggagacagaagtaaaacttctgtatacagttatgtcwaatggactggactctctttggggtgggagaattttccgtggagtagttggcaaatatctagagttgggcactgtcatttgcatgggatgtgaggggtgat

SEQ ID NO: 12942 - DNA, 201 bp, Homo sapiens
gtcaaactgaacattgtcataatacatgccggttgacaccaatcctctgctcttccagcccaggccttcccttacgaggtttaaaaacatgctgaagggtkgaagctaccaagggtcttctggtgtttttctcccttcctctgaagtgcataattattctgtttactggaagattttcaacacaaaggaaattaacttctc

SEQ ID NO: 12943 - DNA, 201 bp, Homo sapiens
tacatccatgaattaactcaaatcaagtcagcaagtatttattggatgctaggtgcttgggctgacagtggagacatcactgatccacatacacagggatycctgacagggcaatggggctccagagctcagtcagcagtttacctgatgacttacagatcctcttatttggttttatcaaaactaacccttacaaaattc

SEQ ID NO: 12944 - DNA, 201 bp, Homo sapiens
ttgggctgacagtggagacatcactgatccacatacacagggattcctgacagggcaatggggctccagagctcagtcagcagtttacctgatgacttacrgatcctcttatttggttttatcaaaactaacccttacaaaattcaacaagtggctcagacgccttcctacaaagaaactaaagattgcagacaacactaa

SEQ ID NO: 12945 - DNA, 201 bp, Homo sapiens
aacgtaaaatgcaataccttctggttagttttcatttactgtttaaaatctagaaagatagaaatttgctggtctaattcaacaaaatttgtgaataatcragggatgtaattaaaaagtaaattttgtgattttgtaaatacagccaatgatgcatttatttcatctgatgtagacataattgtgaaaaattatttttgt

SEQ ID NO: 12946 - DNA, 201 bp, Homo sapiens
catgttgatctttaaactagattttttatcaaattcaagcttttcagtaaatgcaaactaatcagaaggtgttatgtaatctcaatttttaacatgcgggrggacttttgggactgtggggcattcctaactggagatgtccaccaaagacatgtccaggccgggcgcagtggctcatgcctgtaatcctagcactttgag

SEQ ID NO: 12947 - DNA, 201 bp, Homo sapiens
ggccgaggcaggcggatcacgaggtcaggagattgagaccatcctggctaacacagtgaaaccccgtctctactaaaaacacaaaaaattagttgggcgtrgtggcgggcgcttgtggtcccagctactcgggaggctgaggcaggagaatagcgcgaacccgggaggcagagtttgcagtgagaggagattgtgccactg

SEQ ID NO: 12948 - DNA, 201 bp, Homo sapiens
ataaaattgagcataatttgtgttgaaaagctgaggggtgtttaaacttacttaaggtgaaggattacctatagcataggaacattataacggttcactgktctgcaaaactgaattattatgagttttaaaagttataatgagctgtagtattggataagggatagacacataaattaatagaacagaagagaaagttca

SEQ ID NO: 12949 - DNA, 201 bp, Homo sapiens
agccttatggtgaatatgcctagaacagtgtttcctggtgtgggttccttgacacaactgaactaaaacacactgaacaatttctagtacattcagataarcagtatagcttggtctttaaaagctagggtctgtgttgagaaaggcatagctttgtacccctaccccgctatttattggccttgtgacttgtggcaagtt

SEQ ID NO: 12950 - DNA, 201 bp, Homo sapiens
ggtgtgggttccttgacacaactgaactaaaacacactgaacaatttctagtacattcagataagcagtatagcttggtctttaaaagctagggtctgtgwtgagaaaggcatagctttgtacccctaccccgctatttattggccttgtgacttgtggcaagttaactgcttgaaactttcctttcttcttctgtaaaat

SEQ ID NO: 12951 - DNA, 201 bp, Homo sapiens
cacactgaacaatttctagtacattcagataagcagtatagcttggtctttaaaagctagggtctgtgttgagaaaggcatagctttgtacccctaccccrctatttattggccttgtgacttgtggcaagttaactgcttgaaactttcctttcttcttctgtaaaatagagatgttgagagcatttacctcctagtgtt

SEQ ID NO: 12952 - DNA, 201 bp, Homo sapiens
ttaaaagctagggtctgtgttgagaaaggcatagctttgtacccctaccccgctatttattggccttgtgacttgtggcaagttaactgcttgaaactttsctttcttcttctgtaaaatagagatgttgagagcatttacctcctagtgttctccaattgaatgaaataatgcattcaatatgctcccccagagataaca

SEQ ID NO: 12953 - DNA, 201 bp, Homo sapiens
tctgtgttgagaaaggcatagctttgtacccctaccccgctatttattggccttgtgacttgtggcaagttaactgcttgaaactttcctttcttcttctrtaaaatagagatgttgagagcatttacctcctagtgttctccaattgaatgaaataatgcattcaatatgctcccccagagataacacacaatatgttga

SEQ ID NO: 12954 - DNA, 201 bp, Homo sapiens
ggtgcattatttttaaatcatctggcttctctctctcacttgacctgaattttgacatagatgaataaactgagaagaaagctgtgaaaagaaatttgtgyttgatatggttggctgtgtgtccccactcaaattccatcttgaattgtaatccccaggtgttgagggagagacctggtgggaagtgattggatcatgggg

SEQ ID NO: 12955 - DNA, 201 bp, Homo sapiens
attttcctgaggcctcaccagctgtgtggagctgtcagtcaattaaacctctttcctttgtaagttacccagtcttgggtatttctttatagcagtgtgaraatggactaatacagtgctcttttaagtaccgtaactgaagaggagatgagatagttttttggagtgaataaaacgttctgtacttcataaaacccaagc

SEQ ID NO: 12956 - DNA, 201 bp, Homo sapiens
gagtagtaataaatgactcttcttaggggctttctgtgggagcagtgtgaggaggcctcagccttccttatgtaggtccattagtttagagccacattctyttctcatggtgtcactgaagtttttgaggtccagaagctccctttgcactctcttcatcttgtgagctttcagtctgtctctagatttagggcaagaaac

SEQ ID NO: 12957 - DNA, 201 bp, Homo sapiens
gtcttacatttaagtctttaatcaatcttgagtaaatttttgtgtaaggtgtaaggaagggatccagtttcagctttctccatatgtctagccagttttcycagcaccgtttattaaaaagggaatcctttccctattgctcgtttttgtcaagcttgtcaaagatcagatggttgtagatgtgtggtgttatttctgagg

SEQ ID NO: 12958 - DNA, 201 bp, Homo sapiens
tcatatctctatctccttcagttctgctctgatcttagttatttcttgtcttctaacttttgaatttgtttgctcttgcttcactagttcttttaattgtkatgttaaggtgtcgattttggatatttcttgctttctcctgtgggcatttagtgtatacatttccgtataaacactgctttagctgtgtctcagagattc

SEQ ID NO: 12959 - DNA, 201 bp, Homo sapiens
tcaggggtatatgtaaaggtttgttacacaggtaaacttgtgtcactggggtttgttgtacagattatttcatcacccaggtattaagcccagtacccaayggttatgttttctgctcctgttcctcctcccaccctccaccctcaggtagcccccagtgtctgttgttcctttctttgtgttcctgagttcccatcattt

SEQ ID NO: 12960 - DNA, 201 bp, Homo sapiens
ttaagttagacatgctaactgtttttctttaaagggttaaaatcagttatttcctcccttataccattccttgcctgtcttgtctagcttgtttgataccrtttgtcttctgtgtctctcaaaggattaattgtttgtgtgctgggtgtggtggctcgtgtctataatcccagcattttgggaggccaagacaggcagatt

SEQ ID NO: 12961 - DNA, 201 bp, Homo sapiens
cagaagatgacacttgggagcctggtgagtcatcgttgaccttgcgcagggcctgacacatagttcccacccattcacctgcttgagccagacaatgaggygttgtaggggaaaaaaaatttttttcttcaaccctcatatattcttagtcataatagacccctgtaagaaaagacagattaacaagaaaaaaacaaatag

SEQ ID NO: 12962 - DNA, 201 bp, Homo sapiens
acctccattcatcatttgtaccacttggtgaactgaaagtagtgcatccacttgcacaacccaaggcagaagatgacacttgggagcctggtgagtcatcrttgaccttgcgcagggcctgacacatagttcccacccattcacctgcttgagccagacaatgaggcgttgtaggggaaaaaaaatttttttcttcaaccc

SEQ ID NO: 12963 - DNA, 201 bp, Homo sapiens
taaacttaatatacttttctaaacataaatgagaaacaattgaaaacgtaggtggttaaaacttagacaataaattgaaatgaagtgaaattctaataagmcaaggaacaaatgttctgttgttcttttttcttttgtggttgctttttaggcataatttgtttgcaatgtccctttttggtgaccgtatcttctattcaa

SEQ ID NO: 12964 - DNA, 201 bp, Homo sapiens
gataaattaattttacttttgtcaatggaactggtatagtggtttaggccatagattttgaatccaaaagacttgagtttggccgggcgcggcggatcackaggtcaggagatcgagaccatcctggctaacacggtgaaaccccgtctctactaaaaatacaaaaaattagccgggcgtggtggcgagcacctgtagtcc

SEQ ID NO: 12965 - DNA, 201 bp, Homo sapiens
tctatctatctatctatctatctatctatctacctacctacctacctacctaataagattgatattattatccttattttaccgatgaggaaactaagatwctgagacattaaataacttgcttaaggttacacgtatctgggaagcagcctagttcgaatttagttgcaggtgtgcctatctccaaagtcaagctcttaa

SEQ ID NO: 12966 - DNA, 201 bp, Homo sapiens
aaatcctgacttaagctgtttcaggaaagtgatccagtctttggagaataatcaggacataattaagtatgagtaaaaggcttagagttagtctgttctcstctgtaatggggtgttcactagtgtgacagttgtttttgtgactattgcttttacgtacatttttgaccagcacttggaacactacctcagggtaactta

SEQ ID NO: 12967 - DNA, 201 bp, Homo sapiens
ataaagagtaaaaagtgtctttctcttcagagagttcatttttcataatttaccaatgttcatgtcttataatcagtttgtggagaagacaatttacaaartggagtgtgaatatctacaggaactctttattgtctataaatagactttattttaaacagaaaaccagtaattaaaaattatttctgcttgtgttggttg

SEQ ID NO: 12968 - DNA, 201 bp, Homo sapiens
ctggcctacttgaaaatcctctgctaagttctgaatgattaggcacagaacaagttaaatatagatattggagtaacacttgagaaattttaaggactttyttgccatcataatgctaccctagtccttgctacgattagccgttttattggaaatgatcacacagtttagttttagattttcagtttagtttcctctttg

SEQ ID NO: 12969 - DNA, 201 bp, Homo sapiens
tgtgtaacttagaatttctgtatcagctggccatttgatctctaatttcttagttgtatctgtgctaggttagaatgtgcttgaaatgatgttacagtgtsttttggagattaatcacccaataatgatacatttatatagttattaattaccctgcataattatttagttattactatgtggtacattaattcctagact

SEQ ID NO: 12970 - DNA, 201 bp, Homo sapiens
agttcctccagttacaggcactcacaacttcccttggctaggaaagggaaatcccctgaccccttgcacttcccacatgaggcaacaccccaccctgcttyggctggccctccgtgggctgcacccactgtccaaccagtcccagtgggatgaaccaggtacctcagttggaaatgcagaaatcacccatcttctgtgtca

SEQ ID NO: 12971 - DNA, 201 bp, Homo sapiens
gctcaggctggagtacagtggcatgttcatggctcactgcagccttggccccacccaggctcaaatagctgggaccctaccttagcctcctagtagctggraccacaggcatgcaccaccatgcctggctaatttatttttatttttatttaatttatttaaattattaattattaatgtatttaaattattaatttattt

SEQ ID NO: 12972 - DNA, 201 bp, Homo sapiens
tggagacagaagtaaaacttctgtatacagttatgtcaaatggactggactctctttggggtgggagaattttccgtggagtagttggcaaatatctagarttgggcactgtcatttgcatgggatgtgaggggtgatggttgggccgatctatcaggcagccagaagctaggaaagaagaacccaggttgctgaagcaga

SEQ ID NO: 12973 - DNA, 201 bp, Homo sapiens
tcatgttagctgataactgcctgggtcaccctttgtcagtcactgtgtgcatttcagaggatagtatttctttctcctctctaaatagatatggtgccatmatctatttttccctcatttaaattctacttgccttatttcttgcccttggcattgagacagatcacctctgcagccacctgacccagcaggaagaatgct

SEQ ID NO: 12974 - DNA, 201 bp, Homo sapiens
atggtagtggaggcatatacaccttgtctttttaaaatgtatttttaattatggatacataatagttgtacatatgtcataccttgtattttccatcttcytgctatgggcaaccaaactgccagaaatgaggatacaataagaaaagactcaatgggcctgaagggctcttctaagagttaaaagcattttatttattta

SEQ ID NO: 12975 - DNA, 201 bp, Homo sapiens
gagccactgcgcctggccaaaagcattatttttaaagtgctttaagtttgttgattcatttactttttaattcctaaaagggtacagatggatatgatacsaagtggctaaattctggctaggtgatttttttctttttttactgtaattaggaattccaatagcacagaacggccattcttgtattttcttccttgtatt

SEQ ID NO: 12976 - DNA, 201 bp, Homo sapiens
aatattgtatactgaaagatattgttacaacagattaacatagatttaaatttagtatttttgggtttttggcttttttgtttttgtttagacagcatagygtctaacttatgagcaagggctttgaggcttgacagccctgaggtagcattaccagttactagcagttttgattttggtctagatacttgccctctcttg

SEQ ID NO: 12977 - DNA, 201 bp, Homo sapiens
gaaaaacttaggtttgtgagataattccttaaaactttttttttccatcaaatgtgctttatattatgtgtgagcatccgtgatctgtttctggatttacmaaagtttggtacatattcacactggacttcttgccagagtccaaaaatatttttcttcaaaactaatcatatgtatattttttcttcacttcctaacagt

SEQ ID NO: 12978 - DNA, 201 bp, Homo sapiens
tatataaattttactttaatgaaaatgaaaaagaatgcatcttaattagaaatcaggctgggaaaaccaaaggaaagcaacttaatttattttgtttctcyggtatttaaaattgaaataatccatatgtcaccaactcaaatattttctctccaccatctattttatacatctttccagttttgagtggcaagcaaagag

SEQ ID NO: 12979 - DNA, 201 bp, Homo sapiens
cttcccagggtgctatggaccagctttgtgtgcagtaagggaattacatccatgaggtggttctttctgtgggtaggtggttgctaggatacagatagtcrcaacagcatcacggcagctgccttgttcttcagcacatggtgtatcagttgagaaatagtgttttatttcattcactccaacacttttctggttaaaatt

SEQ ID NO: 12980 - DNA, 201 bp, Homo sapiens
taaaatggaagatgatacttgctctgcatagctcaagggcttgttatgaaaatgaaatgtgataatacaaatactttacaaagtgttattcaaaatttttrttatgtgctaaatattggggatgccaaatatttagttatgacttcagaatgaccaaagttaatgggtttgaatggaagagactagaaaggctttgttgat

SEQ ID NO: 12981 - DNA, 201 bp, Homo sapiens
catagtcactgagccagttttaccttcacctctcttctgcatactgcctgtgaataaggccctgtgcatagagcactgtgcatgtagtcctgttccctacrcagcacctagaaaatagttggtgaaccagccaccagagaaggtctccttagcattctgtaaaaccgggaggagggaatggccctaccttgtgtttctagg

SEQ ID NO: 12982 - DNA, 201 bp, Homo sapiens
ctgctactgttttatctcctcaccgtcatctcctgcctgcctcgccctttcacactaaagccacagcaaactttctaaagtgcaagtataactgccccacmttctttaggtcctgtactttagaacttgtatatgtacattcccttgcttagggtactctttccatccccacccacctttgcctggctgcctgcttctcat

SEQ ID NO: 12983 - DNA, 201 bp, Homo sapiens
cccttgcttagggtactctttccatccccacccacctttgcctggctgcctgcttctcatcttcgtttgttattatcttcaggaatccttctctgatcccygcttggctgggctacccactctgtcaccctccctgagtcttccaattacattctttacatccttcttttcagcatgtgctttcatttgctgtgttataat

SEQ ID NO: 12984 - DNA, 201 bp, Homo sapiens
tgaggaagaggaagagtaaaccaagtgtgaggtataaccagtagtacttatttgcctcccttgaatgtgcacccaaacaatctgggcatctgtggattcawcccttgatatctttctagcagaaatataccaaagataatttacattttattaaattttttaaaaatttatatttatctggtaggcatggtgtaaatataa

SEQ ID NO: 12985 - DNA, 201 bp, Homo sapiens
atttggcttaatacctggagcctagtacagaatagagggagctgattgtcctggtgaaaaacccctcatctttccatacctggattgtgttctgtgttgtsctagcttgtgaagtcttacttccacctaagtcaggcttgggggtctaatttctgtttcagagtgagatttcacatcaacaaagtgtctatggctaaaaga

SEQ ID NO: 12986 - DNA, 201 bp, Homo sapiens
tgttaaatatttaattggcccctattaagaataaggccacagtactggaaaccctgagaaatatcaggatgaggaaggtagtctttgattgcaaggaaaaygtgacctaaaagaaatataactgtgatcagtgatgaagaagagtgcacatcataagagaagtaaaaaccacaatgaaagttcagaactgggagaaatatt

SEQ ID NO: 12987 - DNA, 201 bp, Homo sapiens
tctttaacacactgcttttctttctgtcattaaatcctgatgaaaatatcatatttctctgataatgttttaaacatgagttgctacaaatgacaaactgkagataagactcaaattgaaggaccttgaacctaaagcaatatttaaaatattaccagagttcacagtaatctggatcataaccttgtttttaaattgtat

SEQ ID NO: 12988 - DNA, 201 bp, Homo sapiens
agtgggcattacagagtgtttaataggatgtttttcaaagttgatgcttttgcaaaggataatagaatacagatgtttacctgagatcttaattgtttctrgaaatgcacattcccagtagatggcagcattgcttcatttacttcaaaaaagttcagcagttcactctagtgacagtttcactaatgggacagcagggtg

SEQ ID NO: 12989 - DNA, 201 bp, Homo sapiens
caaggaaaacaccaggctttacatgcctggcagctttctactttgtgaaccaggtaagctgtaactgtttcccagactttcatccctgcatatcgttgggrtacagttggttactgtggttagatgcagcaaaagacagatgcacaggtgccagctcatcctcatttttgctggtggtggttgctgtcagcctgcggattg

SEQ ID NO: 12990 - DNA, 201 bp, Homo sapiens
taattctaaaatttatatgagaaggtctagctatgaacatctagatttatcagaaacttactgctaagaataattaagaaaactggataaaaaaacaatcyatttgaaggcatcagataaatactaaggcaatgaggattctaggggctaagatcttagaatgagaaatgcaaagagataaacctgacactcagtgtcact

SEQ ID NO: 12991 - DNA, 201 bp, Homo sapiens
ttagcatttaaattcatccagttttctccatttcttctgctactgttttatctcctcaccgtcatctcctgcctgcctcgccctttcacactaaagccacrgcaaactttctaaagtgcaagtataactgccccacattctttaggtcctgtactttagaacttgtatatgtacattcccttgcttagggtactctttcca

SEQ ID NO: 12992 - DNA, 201 bp, Homo sapiens
ccctgacactgctcctgtttctggagtccccatttaagggtgcagttgatgggaaagagcaggcttcccagacacctagaagaggcagccaggcccttcaygcaggtgagaggattcacagggacctgaaccactgtgtggagatctgactccacgagtgctccacagctggacgaccgtgccccttaaaggccagtcaag

SEQ ID NO: 12993 - DNA, 201 bp, Homo sapiens
actgtccctgagtatggcgtgctaggccctctaactcgcccctgacactgctcctgtttctggagtccccatttaagggtgcagttgatgggaaagagcakgcttcccagacacctagaagaggcagccaggcccttcacgcaggtgagaggattcacagggacctgaaccactgtgtggagatctgactccacgagtgct

SEQ ID NO: 12994 - DNA, 201 bp, Homo sapiens
cttacactgcccacataaaattccaattcaaattgacaaccagcatggattttcacaaattttccaaacataaaagattaaaaacagctttttcttgtttygttttataaaacagctttttcaataaacaaaaatgtgaaatacccaccttaggcccaattattaaatatttaatattatttaatattaatattgaagaaa

SEQ ID NO: 12995 - DNA, 201 bp, Homo sapiens
tgtcagacgggctgtaggtgctatttctagaccggggagcagtgacgggcacctggggctggcctcaaagggcctgacggggtcaggaaggcctgggtgasagagagaaagagctggtcagccccagggaaggtaagtgtccggtctgcttatagaatatgtgcagggtgtgggggctacatggcgggttgccccatagag

SEQ ID NO: 12996 - DNA, 201 bp, Homo sapiens
gggggagggtggcacagccagcctccagctttctggcccaggatacagtgtggatacagacggttttgtttgggtgccaggagaattctgggacacacacraaaaaagaaaaacccagctccttcaggagtttgaaatctgaagagagactgagatgaaagcccaggtcattcagccagtgatgccaagacagcccagggg

SEQ ID NO: 12997 - DNA, 201 bp, Homo sapiens
aggggcaggtacgccacatagtgggagtaggagcaagagcaagagcatgaggcgggtagggggtgggagctgccatatactttaaaatgagaggtcgacgygcactctgtgagaacatactaattacctccaggagggcaccaagccattcatgaaggatctactcccatgacctaaacaccacccaccagaccccacctc

SEQ ID NO: 12998 - DNA, 201 bp, Homo sapiens
agccatccacacagccatggctgcctggatcacaaatcactgaaatgtgccttgcctggcctctgccacagtggccacgcagtgacagacgaacacacaaygcatcctatgaagcagcagacaggtcgccccaagaccagccatctcacacacaggacaggcaaagctctaggatcttcaaggcccaggagccacccttcc

SEQ ID NO: 12999 - DNA, 201 bp, Homo sapiens
ttaacaatttggttttaacagttgatggaacagaaagatacgttagaaaaaaacaaggactttcttttcaatacagaattctcatgcctgtaaacacatgyctgtatgaataaaatccagacacaaaaccatactgctgcaacagcatgattatttcctgatctccaaagcactgagaagtccaacatggaatcctggaaa

SEQ ID NO: 13000 - DNA, 201 bp, Homo sapiens
gattaaattaaaaggcaagaattctttgatcagccaggtttcccttctgtgccttcggggttggggatttaatcaattctgcattctgggggactgttcaytgggtaaatacctattgagtatataaaatgtagactttctaattcagacaggtcctccacagaatggctacagaaagaaccagcaccaaaacagggtttc

SEQ ID NO: 13001 - DNA, 201 bp, Homo sapiens
ggcctcgggccagatacctgcattctgtgtgaggcggttaaatgctgacaaggtgtggattgactgtgacaagttagagttgcccgtggtgaaaccctacrgcaatcatcagaaatgaaataaagaggggtagctcgtaaggccacaaaggaaataagatggaattacagtacataaccattctaaaaagaacttaggaaa

SEQ ID NO: 13002 - DNA, 201 bp, Homo sapiens
acataaaaagcaccaaacagaatttctagagctaaaaaacaggattcctaaaacacaattctattggataagtgtggtggccatgaaaatgtgctctgccragctcctactgcagggaggaaagtgtgctcctctgcaacgctcctgctgctcctgaccctcaggatctgctgcctgttcatgccacggccacgcacgtta

SEQ ID NO: 13003 - DNA, 201 bp, Homo sapiens
cagagccttggtttctcgttatgaatttataccaggctcttggccttttactgcctcatgcatgggtcggcaaactgtagcccacagatcaaatctcgccrctgactgcttctgtaaatgaggcctcactggcacaacctggcccatgcatttacacactggctggtggtgctttcacacagcacagagctgagcggctgt

SEQ ID NO: 13004 - DNA, 201 bp, Homo sapiens
tggtgcccacaaccctgaaaacagggcttgtcgcctccactgtatttacaaaccaaaggtctgaggcccagagaaattaagctacttacacagagtaaaayagcagcatttaaactgtgaccttaatcatcctaaaagacagatctttagcacatcttagccacatttaagggttcacttttgctcctgaggcaagacgta

SEQ ID NO: 13005 - DNA, 201 bp, Homo sapiens
gcagtgagctgagattgcgccactgcactccagtctgggcaacaagagcaaaactctgactcaaaaaaaaaaaaaaaaaaaaaaaaaagacaaggaaagcrggttttgttgtttgttttactttctaatggaagatttgctagattcctttcaaaagactttctagagagccaatcatttcagtaagctacttttagatta

SEQ ID NO: 13006 - DNA, 201 bp, Homo sapiens
gctgagctgctggcagaggggaggaggctgtgggaaccaaggaagctaccaaagtgaacttgggtctccgaactcaccacagaagcggggactccaggaaytctgtggcaggttgtttctttctccctctactttatatgaaaaacacctgcagtgaccaactcaagactatgaatggtcatcaccgcacaatgacatggt

SEQ ID NO: 13007 - DNA, 201 bp, Homo sapiens
gaaggcctcaggaagcttccaatcatagtggaaagcaaagcaggggcaggtacgccacatagtgggagtaggagcaagagcaagagcatgaggcgggtagsgggtgggagctgccatatactttaaaatgagaggtcgacgtgcactctgtgagaacatactaattacctccaggagggcaccaagccattcatgaaggat

SEQ ID NO: 13008 - DNA, 201 bp, Homo sapiens
cgcacgcacatagacgtacgatggggaaattcccatggaaacacttttatttctggaagtcagaagaaaaacaatgtgcacaacctgaatgacacagagcrgcagcgctgaaaccacaggggctgccgagagctggcctttcacagcagaccactgttttccagtgagaatggtgggccattccaaaacaaagctaaaggg

SEQ ID NO: 13009 - DNA, 201 bp, Homo sapiens
tgtctaagtcacctcttaacactggggcggggggcgaggtctgctattctctccacaaaacatgaaggggccagagtgggtggagagaccatgaaaatagwcagctatgcaaggtcgcatgaccaatgccggcattttccactttcagaatggcacagagaggtttctagagaaggaccattagacagccgtcctatggtc

SEQ ID NO: 13010 - DNA, 201 bp, Homo sapiens
ccaaggggagccgagtcataggctgggttctcagggaaggatggctggcagctccaaacccacggccaggggacagtggactctggctcaggaccctgatrctacctcacctgtgggcacggctctcagcagatgcaacctcaactccaacctgagagaccaaagtggggcagggcagcagagcccggagtcagagacggc

SEQ ID NO: 13011 - DNA, 201 bp, Homo sapiens
cgcaggctctgtgtcgagtcctccagaggaaagctctgcagccagggaggcaggggcgacagcagggaccagccacccaggaaagggacaggaaagggggmaaaaaacagcaaaaggagccaggttccaggcagggactgggagtttctgaatggaaatgcacgccaggccattcccggtacacccatcactgactcccaa

SEQ ID NO: 13012 - DNA, 201 bp, Homo sapiens
aaaagcgaatgagcaaacttactcacatgcttaaagataaaatttgacagtttcatttgtcttcctattagaacccttaaatcagcctccttcaagcaagygcagccagcgtgagccaggggacagacactttcagtggaacatttatggctctgagaacagcaccactcttttggggacaagtccatcactggagctccc

SEQ ID NO: 13013 - DNA, 201 bp, Homo sapiens
agagcctggcattccgatggggaaggacagaaaggctgggaccctctgctgagaagaggctccttttcccaagggaagctcgctgcttcgagtcacacacrtgttgctgttataaggtcctttgctttgacaattcgagagagtattagaaaacactagcggcgtgaggtgactactgacaatcacctcctctgttttctg

SEQ ID NO: 13014 - DNA, 201 bp, Homo sapiens
ttattttgcttttgcatcttatgtcatcaacagcctaagctcaaatctcccttcaaaggagtttgagacgctgaggacggccacgtgaatctttctcaacrtctctcttaaaacatattgttctgtaaatctgtggtaattttctccttttgctatttcttcttcacgttcttattttttctactctaatgtagcacatta

SEQ ID NO: 13015 - DNA, 201 bp, Homo sapiens
aggcctttagaaaaactcttcagcataatgtaagcctcaattaaaccacaccacaccaaacagggcccagagcagcgtgtgtgcacgtgtgcagtttcgaygtgcccgcacgcacatagacgtacgatggggaaattcccatggaaacacttttatttctggaagtcagaagaaaaacaatgtgcacaacctgaatgacac

SEQ ID NO: 13016 - DNA, 201 bp, Homo sapiens
cttaacaagcaataaaggtaacaaaagcagtgatgggacaaatgggaaccatatgccaaatatccctcaaaaccacattgagggatattcagcaaggtaastgttctgtagtcttcaaaaatgtcaaggtcttgaatgccaagaaaagcctgaggaactgatccagattcaaagagatgtagcagaggaaacaattcaatg

SEQ ID NO: 13017 - DNA, 201 bp, Homo sapiens
cataattagacactggcaacacgtaactgagatggtgcagaaatgttctaaaccaataatttggtcaggttatggataaaatgaatgtcactggtaagcgrcatgtttacaataattatgttagaaaattggtcataattatcacttgagtccctcaattgagaaatggtactcaaatgaaaataaacacaattgatattg

SEQ ID NO: 13018 - DNA, 201 bp, Homo sapiens
cagcagtgttagagacaagggagagaagtcactgaaagtggcacactgacctgcagggtgtgactttggggaggataagggggtcagcagggaaaaaggarggttcaagctaggattatggttgacagaggagtcaaaggttccaccaggattcaagcctgaacagacggcaggagggaaggcaagatggcccagggcaca

SEQ ID NO: 13019 - DNA, 201 bp, Homo sapiens
ggggaggataagggggtcagcagggaaaaaggagggttcaagctaggattatggttgacagaggagtcaaaggttccaccaggattcaagcctgaacagayggcaggagggaaggcaagatggcccagggcacaggaccacacagaggatgcagagagcagcagctctagctcctgcagcccgagaggtgagatgccccac

SEQ ID NO: 13020 - DNA, 201 bp, Homo sapiens
gaacagacggcaggagggaaggcaagatggcccagggcacaggaccacacagaggatgcagagagcagcagctctagctcctgcagcccgagaggtgagaygccccacacagtcacacaaccttggcaggctcgagctctcgagtcatggtctcctccttgtaaaatgagggagtcccgccccacagaagtgctgtggaac

SEQ ID NO: 13021 - DNA, 201 bp, Homo sapiens
cagcaggaggtgagcaagcaagccagtgaagcttcatctgtatttatagccgattcccctgctcgcattactgcctgagctccacctgctgtcagaccagsgcagcatgagattctcacaggagcacaaaccctattgtgaactgtgcatacaagggatctagtttgcacactccttatgagaatctaatgcctgatgatc

SEQ ID NO: 13022 - DNA, 201 bp, Homo sapiens
aatttaaacccaactctcagtaaccgacagatccagcagagagaaaatccgtaaggagaccgatgaccccaactctgagtaaccaacagatccagcagagrgaaaatcagtaaagataccgatgaccccaactctgagtaaccgatggacccagcagagagaaaatcagtaaggataccgatgacttgaataccaccgtca

SEQ ID NO: 13023 - DNA, 201 bp, Homo sapiens
aagcacagctcttgcgctctcagaaagcctttccttcgccacacacagagcaggcctatgctgctgtctgtggcagggcctccttgcgaggctggcccttkgttggcttctggaaactcagcttctaaaaagtgccccatgctaatgaggctgggcagcaaactcagccctaccagggtacgatgggagttatggagaaca

SEQ ID NO: 13024 - DNA, 201 bp, Homo sapiens
acaggttcctgccggtttccagttatgcacagcatggcgtttccatccacaacaggtcacatatacaatgtggtcctacaagattctagtggagctgaacrcttcctatcacagcagctgtcacagcgccgtggctcagcgcatgactcccgtgtctgcggtgatgtggcattgacaaacctactgcactgccagtcgtgg

SEQ ID NO: 13025 - DNA, 201 bp, Homo sapiens
aaatacttaccgtcgtgttacaactgccaacagtattcagtactgtaccatgctgtacaggtttatggcctaggagcaacaggctccaccacaccacctargtgtgcaggttatagcatctacgcttgtgtaaacacacactatgatgttttcacgatgatgaaatcgcctaacgacacctttcttagaacatatccctgt

SEQ ID NO: 13026 - DNA, 201 bp, Homo sapiens
tcaactgcactggggcatgcacagaaaaaaatatgaatagcatcttcaacacggttgtctttaggaggtgggttcgttcaacttcactgtagatttccatraagcgtgaattgaggataattaatgtaaattatttctaagatcagaaaaatactacttaaaaagtaaaagaaaaaaagcttagtattaaagaacaaaaat

SEQ ID NO: 13027 - DNA, 201 bp, Homo sapiens
acaacaaggagacagaggctcagagaggttaggccccttgcccaggggcacagtgacaggtgagtggctgagtccctctcaagggatccttctgacctggktatgaaatggtgagtctctggtattacaacaatcattttcttctcagaaatatacttttattttctcctcttggtctccatcacctacgcatccctgtcc

SEQ ID NO: 13028 - DNA, 201 bp, Homo sapiens
cagaggacccctctaatttctggtcggtcgccctgtcaatcagcaaactcacggccctcaggttgaaatgtgttgtccacctggagtaggcactgtaaccyttggccattgtctccaggatgcagaatatttattcagaggccaaaagcagtgctttgtgctttacttccatctcctagtaatggctcagaaagacaagga

SEQ ID NO: 13029 - DNA, 201 bp, Homo sapiens
gtttacattttgatcagtgaacttttagtgacatgtgcagtgagccagctgtccctctggtcatcctaggagactactgtatcactcacatcccatcaggyagagaaagaaggtaagcaccaacggcctaagaacaccaacatcacagggccaagaacagagctgccatctgtaggcaccaacttcctaatttacatccaa

SEQ ID NO: 13030 - DNA, 201 bp, Homo sapiens
agaacaccaacatcacagggccaagaacagagctgccatctgtaggcaccaacttcctaatttacatccaaacgttgaggagagggaagttgagtgcccckgccatccttgtgcctccaggccctcgagaggcaaagtgttggtgcagtctgcacagagcatcctgggtagaggcaggaagcagcacagggcaggctcagg

SEQ ID NO: 13031 - DNA, 201 bp, Homo sapiens
cccacctcagcacctcagcctcccgagttgctgggactacaggcatatgccaccacacctggctgatgtttgtatttttagtagagatggggtctcaccaygttgcccaggctggtctcaaactcctgggctcaagcgatcctcctgcctcagcctcccaaagtgctgggattatagacgtgagccaccatggctggccaa

SEQ ID NO: 13032 - DNA, 201 bp, Homo sapiens
aatgctgagaggcaactgaagcacgcttgtcaccccagcagccaactatgcaaagcttctctgttacacgggcaccactcacacttcaagaccagatcctraaacttgtattttcttctagaattgttacacctcgttttgtttttagtaatttatgcttaatatataaaatacaaaataaaaaacttgttttttaacaaa

SEQ ID NO: 13033 - DNA, 201 bp, Homo sapiens
gccctctctcaagtgggaacagggtgtgtgtcaccctcctcgtgaggactggtaggaattagtataaatgctattaaaacagggcttttagtgctgatctrcattcaaaatagagatgcttggcctttgattgaaaactgcattacatctcctttcttctgaatccgcctctggacctctggaacgggcacatcgatgtaa

SEQ ID NO: 13034 - DNA, 201 bp, Homo sapiens
cacagtaataatagatacaagagtctggtcttctctgaagaataaagaacagctttaaatactttatttttcaaataactcagctgaaaatcatcaagctrcatttatcccgtttcagtagtataatcagctgcacagaagtatctactgagtcagatttagtgacaacatgaaattgaaagcagctaaggctgaggaata

SEQ ID NO: 13035 - DNA, 201 bp, Homo sapiens
agatacaagagtctggtcttctctgaagaataaagaacagctttaaatactttatttttcaaataactcagctgaaaatcatcaagctgcatttatcccgkttcagtagtataatcagctgcacagaagtatctactgagtcagatttagtgacaacatgaaattgaaagcagctaaggctgaggaataattctcctaaag

SEQ ID NO: 13036 - DNA, 201 bp, Homo sapiens
tttcaaataactcagctgaaaatcatcaagctgcatttatcccgtttcagtagtataatcagctgcacagaagtatctactgagtcagatttagtgacaamatgaaattgaaagcagctaaggctgaggaataattctcctaaagtgatcactacacagaatgcataatccagggggcacccgcagggcccgtgccaccca

SEQ ID NO: 13037 - DNA, 201 bp, Homo sapiens
tgtgcccccaaagcacccaggagtaatgctcaggagtgctaagtacactttattacaatgaaccatccccattggttcaacagcccccaaccccgggcccrtgggagccttgtcttaagtttcttcatattcatatccctagcacctaagagagcctgccacaccacaggcactccagaaacacttgctggtgacctgacc

SEQ ID NO: 13038 - DNA, 201 bp, Homo sapiens
aaaccacattcttgttctcacggctcagaccccatgaagccaaccctagtggcggctgagcttgtgcgtgagaagctcatcaggggcactgccaatcaacraaagcagcaagcactgcaatataaaacagacacgaaggccctaagagtccacccatctccctctctccgcacacagatgtgccatttgctgctacctgtg

SEQ ID NO: 13039 - DNA, 201 bp, Homo sapiens
tttttgttcttaaccccttaaatattctttaactttgttttcaacttttcagaaatgatcatgcgattgtaaaacagtgggaatgcagctgtgtaaactamggccggttctatggatgtttctataattgaagaattgctttttgtcaaaaatacggattcccggtccccaacgcaggagggtctggtttttagatcctgg

SEQ ID NO: 13040 - DNA, 201 bp, Homo sapiens
tccatcttgatttactgataatgtcttgggaaatatcattatgtatagttttcgtagtggttcctctaggtatcacagcacgcagacgtaacttctcacarcctgtttgcgtggatgttttgttgtacctgagcgagttagaaaaacaccacctttgagacgaattaagagtcctttattagctggcgaccgagagacggc

SEQ ID NO: 13041 - DNA, 201 bp, Homo sapiens
taacttttataccttggtttaggaaggggggggggtctagttaaaacaattttacagaagtaaagtagtcaaaaagttaaaagggtaaatggttacaggaragtaaacagttcaaggtgcaggggctttaagactattacaagatgatagacccggggctttgggcgttatcaatcggacaaattcctgggaactgcggat

SEQ ID NO: 13042 - DNA, 201 bp, Homo sapiens
aaaaaatgaaattcatacagatcagaaaggaagaaataaaactgtctatttttagttgacatgactgttcacatagaaaacccaaaggaatctacaaaaamctcctggaactaatgagtgagcgcagcaagtttgcaggctgcaatgtcaacatatgaaaatcagctgcatcctatgtactaacaacaaacagaaggaaac

SEQ ID NO: 13043 - DNA, 201 bp, Homo sapiens
aatttaacagaacagaggatccagaaataagccagcacaaatattctcaactgacgcagtagtgcaccacacaatgacatttggtgaatgatgaactgaayggcacataagatggtggtcccataagattatgacattatattttgacttaccttatctgtgtttagatgcataaattatggatgagcacagtggctcaca

SEQ ID NO: 13044 - DNA, 201 bp, Homo sapiens
tgaggtgaggggctatcagcctaccagggcagaaccccaaactgggctaaccagccggaggaatgcagggagggctcccaggaaagggctgcctggctctsggggacctggtccacaggtgggggagagagagggtagccacagccccttgccccacagggcatctggtggttcttttcattggcagtctaggtgggttga

SEQ ID NO: 13045 - DNA, 201 bp, Homo sapiens
ctaccagggcagaaccccaaactgggctaaccagccggaggaatgcagggagggctcccaggaaagggctgcctggctctcggggacctggtccacaggtsggggagagagagggtagccacagccccttgccccacagggcatctggtggttcttttcattggcagtctaggtgggttgaatggcagacttccaccagct

SEQ ID NO: 13046 - DNA, 201 bp, Homo sapiens
actgggctaaccagccggaggaatgcagggagggctcccaggaaagggctgcctggctctcggggacctggtccacaggtgggggagagagagggtagccrcagccccttgccccacagggcatctggtggttcttttcattggcagtctaggtgggttgaatggcagacttccaccagctcacagctggggagggtgacc

SEQ ID NO: 13047 - DNA, 201 bp, Homo sapiens
gaggtggaggttacagtgagtcaagatcatgccattgcactccagcctgggcgatagagtgacaatcggtttccaaaaaaaaaaaacaaaaaacaaaaacmcagtaagtattattaattcattaattataacaagtgtaccatactcacagaagaagttaataaaatggaaactggatgtgagatatgagagctcactact

SEQ ID NO: 13048 - DNA, 201 bp, Homo sapiens
tcaactgagggagagtctacaaaatacctcaccagcactccttattaaaaacaaagtctgagaaaatgttacaaccaagaggtacctaaggagacatgagkacccaatgtcatgtgatattctagacggggtattggaacagaaaaaggacattagggaaaaactaaggtaatctgaataattcaaagtgtgggctttagt

SEQ ID NO: 13049 - DNA, 201 bp, Homo sapiens
ccatggtgccaggctgcactgacagcaagtgcccctgatgcttcacctctgtggattcctccccaaaacacacagtccaatctaatcgctagagaaacatygggcaaccctcaactgagggagagtctacaaaatacctcaccagcactccttattaaaaacaaagtctgagaaaatgttacaaccaagaggtacctaagg

SEQ ID NO: 13050 - DNA, 201 bp, Homo sapiens
gccatggtgccaggctgcactgacagcaagtgcccctgatgcttcacctctgtggattcctccccaaaacacacagtccaatctaatcgctagagaaacaycgggcaaccctcaactgagggagagtctacaaaatacctcaccagcactccttattaaaaacaaagtctgagaaaatgttacaaccaagaggtacctaag

SEQ ID NO: 13051 - DNA, 201 bp, Homo sapiens
aaggctgtggtgtgcatggggctttctggaaagaggaagagcagcttccagtggagacccagcaagcacgacctcagccaggagcccacggtcagggccayggtgccaggctgcactgacagcaagtgcccctgatgcttcacctctgtggattcctccccaaaacacacagtccaatctaatcgctagagaaacatcggg

SEQ ID NO: 13052 - DNA, 201 bp, Homo sapiens
tcattcacctccaggtatccccacaatgctgtttccagaaggaaatgcaatgagaactgctgctgatgtctctgatggacaaaaggaattctatgaatttmcagaaatggtcattattatttattactatttaatttcaactgatcattttttaatatcaagcaaccgaatttccttaaacaaaatcctctaaacagtcag

SEQ ID NO: 13053 - DNA, 201 bp, Homo sapiens
ttccgctcagcatctgatggaaattgctgctagcacaagctgtctgtcgggtggccagataaaaggaagccactctcaccagggtggggccttttgttagwaataaaaaccctccatctcctcctactcctggggaaggcctgcactctctcaggggtgtgtgcaaggagttacagaaggcttcacacaagacatttcagt

SEQ ID NO: 13054 - DNA, 201 bp, Homo sapiens
tttccgctcagcatctgatggaaattgctgctagcacaagctgtctgtcgggtggccagataaaaggaagccactctcaccagggtggggccttttgttakaaataaaaaccctccatctcctcctactcctggggaaggcctgcactctctcaggggtgtgtgcaaggagttacagaaggcttcacacaagacatttcag

SEQ ID NO: 13055 - DNA, 201 bp, Homo sapiens
gtaatgggcttctaagaaccactgccatgaaaaggcatccatggcctccacttgctccaggaaataaccggctgccaactaccttctgctctaatagtcayacgttctgtggaatgtcctcaaatgctgtttgctcccctgcagcaaaccagtgacctgacacgtgtacctgaagaccgatgagaaggtcttcccacctcc

SEQ ID NO: 13056 - DNA, 201 bp, Homo sapiens
atgggtgagaaaaagaagaaacaacgaacaagatcagacagcgtccagagcagcgctccagagacagagcataaaataactaggtttaaaatgtctacagagagaagcaatgggggaattaccaacaaggaataagatcctaccaacaagatgcaaatagcactggcataaagaaaaattcaaatctagacccatctcaca

SEQ ID NO: 13057 - DNA, 201 bp, Homo sapiens
gggacatacttatactaaaatactagctgctctcagttcaagcttaccttggcatcctgtacttcatctggcaacctgactcaggagggacccactctcaycaaatgcccatggatggagccccacagggcagaagctctgtacccaaagtctccaacacagtcaagaaaagaagccaccatgggtgagaaaaagaagaaa

SEQ ID NO: 13058 - DNA, 201 bp, Homo sapiens
aaattcctatcttagaaccccaccccacagcccaccccacccagctgccactacctgtctctattgtgctttatagttagaccccagtgctggctgaactsgctccacccctctcctccagtcacacacacaactctgcaggagaggcaacacagcagaggcccagggctccaccgtccggtgaggaaaggccaccaccag

SEQ ID NO: 13059 - DNA, 201 bp, Homo sapiens
cggctttgtttcaatatataagctccaaacagatttcagaaattagctcagacacagggtgggcgagcctccccagcgtcacaccactccctgagaagtgygctcctgtgtaaccctttctgggctcatccatccatcagtaaattaaattaaacataagggtcaggaaaagatccatgaggaagtatgcctgggattcct

SEQ ID NO: 13060 - DNA, 201 bp, Homo sapiens
ataacggctttgtttcaatatataagctccaaacagatttcagaaattagctcagacacagggtgggcgagcctccccagcgtcacaccactccctgagargtgtgctcctgtgtaaccctttctgggctcatccatccatcagtaaattaaattaaacataagggtcaggaaaagatccatgaggaagtatgcctgggat

SEQ ID NO: 13061 - DNA, 201 bp, Homo sapiens
gaaacaaacagtgatctggcctggccacgcctgcttggtgaactgggatctctgatgagctgagaggcctccctgcctctgggatccctgcttggtgaacygggatctctgaggagccaagaggcccccctgcctctgggatccctgctccatcaacggtcccattcctctcttgcatcttttccctctttccacaagcac

SEQ ID NO: 13062 - DNA, 201 bp, Homo sapiens
ctttcaaacttaattaagtaacttataaactgaaaatttgtattttaacacaactagataccaaactgagttccaagtaaggtctgaatgtcatgaggaayctaaagcagtcacgtctggccttccgtctcccgcatgtttaggtaaactgatcctagtgcctttctgtaaggtgaatttcataaaggcaagaacatacag

SEQ ID NO: 13063 - DNA, 201 bp, Homo sapiens
gaggcaccaggccaagtagtagtcaacagtttcctttcatgaggcagtaacagggtctgtacttgcctcccagccagatacatttagaaactggagaaacygagtctggtggttgcatctgactctgggcaggacacagtgactagattttacggagtagagcactaaaggggtggggcctaggcagaaaaagagctccag

SEQ ID NO: 13064 - DNA, 201 bp, Homo sapiens
gtaaggactggatgagttctgatgttagaaaagtgtccacttctaaatgctacagccaacctgggatctgtgccatgagggccaaggccgcacaatgaggyttctcccaggctcttctcttgggtgcacaatttagacatgccctatatagtgcttcaaatgccagctgttcgcacagaaatcagtcaaggaaaaaaatat

SEQ ID NO: 13065 - DNA, 201 bp, Homo sapiens
acaccgatgtgccccctctagatttatgtgcttgagataaatttctagaaatggaactgcttgcttaaggaaaaacaataaacagagcaatagatgctgaygcagccatcggaatgggttgaatttaataacgccaagatgctgctccagatcattatgctgctgcttacacttcggggctgattcagagccttggtttct

SEQ ID NO: 13066 - DNA, 201 bp, Homo sapiens
tcgtgatttcccccaaatatctgtgtgcaaatctgtgtgtcagaagtccatgcttaatgtaaactaacatgatgattttcctgaccctcacagttaagagrgtgaatggcacacacacacaggtgctaccctctcccccaccaaccggaaggctacaaagaaacctgaaccaggctgcctgagggaggggccctgggcggc

SEQ ID NO: 13067 - DNA, 201 bp, Homo sapiens
ttcccacccgtgcatcctgattcatatacaggaaagactggagaagagacagtattggacacgctcatcaaacccactcgtgatttcccccaaatatctgygtgcaaatctgtgtgtcagaagtccatgcttaatgtaaactaacatgatgattttcctgaccctcacagttaagagggtgaatggcacacacacacaggt

SEQ ID NO: 13068 - DNA, 201 bp, Homo sapiens
aaattacaaagccaaacattccaagtcctcttccagagccaagcagctaagctgccctccacccatgaccctggcgtgtgtcagtccctggtggcccaccsggagtgttccagggcgaggcctggagctgggaagggattttagacagtgcactgggaggcaccctgcccagtcaccgacaacctgggctgactcagtgta

SEQ ID NO: 13069 - DNA, 201 bp, Homo sapiens
gcaggtactgcagccctggggccgtggggaggcccaccaggatgaaggtgctgaccttggtgacattctccccactcatgcctctgtgcttgggagctgcrggcctacaaaacatcaaagagcaagaggaaagggctgcagggcagctgaggcagagagagagtggagctggacttggatggggagttttggtgcaaagag

SEQ ID NO: 13070 - DNA, 201 bp, Homo sapiens
aagaggtaggtgagcaggaagaggaggaagagcaggtactgcagccctggggccgtggggaggcccaccaggatgaaggtgctgaccttggtgacattctycccactcatgcctctgtgcttgggagctgcaggcctacaaaacatcaaagagcaagaggaaagggctgcagggcagctgaggcagagagagagtggagct

SEQ ID NO: 13071 - DNA, 201 bp, Homo sapiens
catcttgggggtgatgtcagacacgtaccagatctccaggaaagacatggagctcagaaagtagtacatgggcctgtggagggaggtgctgctccagacgrtgaggatgatggccaggttctccaccaggacaaagaggtaggtgagcaggaagaggaggaagagcaggtactgcagccctggggccgtggggaggcccac

SEQ ID NO: 13072 - DNA, 201 bp, Homo sapiens
acatacatgaaaagcaaggctgtatagaagacggtgaccacggtgaggtgagaggcgcaggtagagaaggctctccagcagccggtggccgaggggatgcrcaggacagccagggtgatgtgccaatatgacagtatggtggccaggagcggaaacaccaggatgatgaaggccaggatgaaatccaccagctctgcagtg

SEQ ID NO: 13073 - DNA, 201 bp, Homo sapiens
aagcaaggctgtatagaagacggtgaccacggtgaggtgagaggcgcaggtagagaaggctctccagcagccggtggccgaggggatgcgcaggacagccrgggtgatgtgccaatatgacagtatggtggccaggagcggaaacaccaggatgatgaaggccaggatgaaatccaccagctctgcagtggagaagtccgt

SEQ ID NO: 13074 - DNA, 201 bp, Homo sapiens
acggtgaccacggtgaggtgagaggcgcaggtagagaaggctctccagcagccggtggccgaggggatgcgcaggacagccagggtgatgtgccaatatgrcagtatggtggccaggagcggaaacaccaggatgatgaaggccaggatgaaatccaccagctctgcagtggagaagtccgtgcaggccagcttgaggatg

SEQ ID NO: 13075 - DNA, 201 bp, Homo sapiens
agcagccggtggccgaggggatgcgcaggacagccagggtgatgtgccaatatgacagtatggtggccaggagcggaaacaccaggatgatgaaggccagratgaaatccaccagctctgcagtggagaagtccgtgcaggccagcttgaggatgggggaaatgtcacagaagaagtggttcaagacgttggagccacaga

SEQ ID NO: 13076 - DNA, 201 bp, Homo sapiens
tgtgaagtttgacccaagcccaaggcctttttcaaggcgtccttaaattccttgttcctcaggcagtaaatcaaagggttaattattggcgtgacaacagygtacacggcagagatgagcttgttggagctctgggaatcaatggcttggggccggacatacatgaaaagcaaggctgtatagaagacggtgaccacggtg

SEQ ID NO: 13077 - DNA, 201 bp, Homo sapiens
aggagcggaaacaccaggatgatgaaggccaggatgaaatccaccagctctgcagtggagaagtccgtgcaggccagcttgaggatgggggaaatgtcacrgaagaagtggttcaagacgttggagccacagaacgtgacgctggagataaaacagaccttgatcatggagatggtgaagccactcacaaaggagaagccc

SEQ ID NO: 13078 - DNA, 201 bp, Homo sapiens
tggagaagtccgtgcaggccagcttgaggatgggggaaatgtcacagaagaagtggttcaagacgttggagccacagaacgtgacgctggagataaaacasaccttgatcatggagatggtgaagccactcacaaaggagaagcccaccagctggaggcacagccccggggtcacaaggacgtggtagcgcagcgggtggc

SEQ ID NO: 13079 - DNA, 201 bp, Homo sapiens
aaaacagaccttgatcatggagatggtgaagccactcacaaaggagaagcccaccagctggaggcacagccccggggtcacaaggacgtggtagcgcagcrggtggcagatggccacgtagcggtcgtaggccatggaggccagaagcacacactcggtgcacaccagggagctgaagaagtagagctgcgtcatgcaccc

SEQ ID NO: 13080 - DNA, 201 bp, Homo sapiens
atggtgaagccactcacaaaggagaagcccaccagctggaggcacagccccggggtcacaaggacgtggtagcgcagcgggtggcagatggccacgtagcrgtcgtaggccatggaggccagaagcacacactcggtgcacaccagggagctgaagaagtagagctgcgtcatgcacccgacgaaagagatgcgtttctgc

SEQ ID NO: 13081 - DNA, 201 bp, Homo sapiens
caaggcgtccttaaattccttgttcctcaggcagtaaatcaaagggttaattattggcgtgacaacagtgtacacggcagagatgagcttgttggagctcwgggaatcaatggcttggggccggacatacatgaaaagcaaggctgtatagaagacggtgaccacggtgaggtgagaggcgcaggtagagaaggctctcca

SEQ ID NO: 13082 - DNA, 201 bp, Homo sapiens
gccatggggtctcccctccacccctgcagatgccctctctcaagtgggaacagggtgtgtgtcaccctcctcgtgaggactggtaggaattagtataaatrctattaaaacagggcttttagtgctgatctgcattcaaaatagagatgcttggcctttgattgaaaactgcattacatctcctttcttctgaatccgcct

SEQ ID NO: 13083 - DNA, 201 bp, Homo sapiens
ggggactcggggaccacagtgggaccgcagagcactggtgggcggcaggcccgcaggctgtggcaccaggccgagccatggggtctcccctccacccctgmagatgccctctctcaagtgggaacagggtgtgtgtcaccctcctcgtgaggactggtaggaattagtataaatgctattaaaacagggcttttagtgctg

SEQ ID NO: 13084 - DNA, 201 bp, Homo sapiens
tcctctctgaaaaacacaaaatcacacagcagcacattgtgaccactctggttcctgtaggcattagtaactattaggtaaaaataccaagaaacctcttrgtgataaaaatgccaacatctacatctttattgcctattaatttgtttaattatctgtctatcccccaccactctgtccatgtaagtttcgttaaaggca

SEQ ID NO: 13085 - DNA, 201 bp, Homo sapiens
aaagaggctccttcactaaaacaaacaaaacacagcaacaacaaaaactcctttctggagaagtgactgcattgtccccaggtgctgcagactcatccacyggccagctttctccatttccacagtcttacctctctgaactgatgtaagacacggtcagtctgatgagctccaatggtgacttccgggagaaagatagga

SEQ ID NO: 13086 - DNA, 201 bp, Homo sapiens
cctcatctcagggagaaaggttttcttataggcattctcaatgtcctgtagataggcagaggtgatcttcatttcatgtggctaaacagaagcagaaaaaycaaactgggaaacatttagagttcattctctttgacctgtgcgtatataaaatgcgaagacaatcactgaccaccattttcttacaactcacaccgggca

SEQ ID NO: 13087 - DNA, 201 bp, Homo sapiens
aaccatatatctgagaaaaaggtatcattctgtgtaacataaaatcatacctagtttctctgctatttcttttgcaagtttgccttttccagtacatatartgccatctacagttatcactctgctgcgttctgtcagtcttttgcttgctttatccccaagtaggaaatgccacattccatagcgcagcttgcactgcac

SEQ ID NO: 13088 - DNA, 201 bp, Homo sapiens
ttatagtcggtggcgaggggcttcccatctcctgtggtactgtctggataatgaatccccgcttcaggaaagtgcttgaagcctgaaaagagaaacagtcrgatgcagtctgatgcacatcactcactccccgcagggagcagtggggactagccaaaacacacagcccgcccgaatctcaccgccagggatggagccaat

SEQ ID NO: 13089 - DNA, 201 bp, Homo sapiens
ctccattacctatactacaggatggattgctttttgtgagaccccttcttccactgtgcaatttttgcattatttaccctcccccgatcttaaagctatayggcgtccaggagagtgcggctgatgcagcttggccatcactgtgatgcagctggagcagaaggcggcccgttcacttcagccagatccacttgtctccca

SEQ ID NO: 13090 - DNA, 201 bp, Homo sapiens
tgtaggaataactttcaacttttcaaccattttcttaccttttttgaatcttgagcttcccttgcagaatattgtaaaacctcacatttttcactgtaagraaaaacaagatgaaattcagtgtaaacttttccaagctgaagttaaatgtacaaatgaatacataccgctaaagtctcctgctcaaatttaaaacctcac

SEQ ID NO: 13091 - DNA, 201 bp, Homo sapiens
catctgtaattttcagatcgtagaaaccgaattacttgaaagaaactcgaaacctcatggccaggggagtgtgatgatgggtttgactggcactgctttcrggtgataaaacagtgatgtttgttaagaccagtgggaatctaactgacgatctgatttgcaagaaccttacacatgaatcaaatgtaggaataactttca

SEQ ID NO: 13092 - DNA, 201 bp, Homo sapiens
tacaggcatatgccaccacacctggctgatgtttgtatttttagtagagatggggtctcaccacgttgcccaggctggtctcaaactcctgggctcaagcratcctcctgcctcagcctcccaaagtgctgggattatagacgtgagccaccatggctggccaagaggtaacattttaatacattataagctatgaatatt

SEQ ID NO: 13093 - DNA, 201 bp, Homo sapiens
aagtgcgattgtcctgcttgagccacggccctttatcgaacttcaggtattcaatgtcctctaccaccttttttgaatcttgagcttcccttgcagaataytgtaaaacctcacattttttcactcatctcagggagaaaggttttcttataggcattctcaatgtcctgtagataggcagaggtgatcttcatttcatgt

SEQ ID NO: 13094 - DNA, 201 bp, Homo sapiens
ggggggagggtggcacagccagcctccagctttctggcccaggatacagtgtggatacagacggttttgtttgggtgccaggagaattctgggacacacamaaaaaaagaaaaacccagctccttcaggagtttgaaatctgaagagagactgagatgaaagcccaggtcattcagccagtgatgccaagacagcccaggg

SEQ ID NO: 13095 - DNA, 201 bp, Homo sapiens
aaacagctggatagagcccgaccaataccatccatgctcccccaagtgggtggcgctgttggcaggtgacgactggttgccaatgttggcgacacagcccrgaagtgtgagtcctgcgttctcacggctgctgcactgccgcccgacctgccgctgccctgcgacattccctcccatgggtggttcctttcgcctgctgtt

SEQ ID NO: 13096 - DNA, 201 bp, Homo sapiens
gcaatagtctgcttaattttgaaaacctaaaaagcaagaagcaacttggctgggcaaggaggggcaacaatgcccctgttaagtgggggctctcgggaaaagagacagtgcctactctcagcgcccccgcccatagcaccagcactctcacctgcaccaccaggaccctccctgaccgccttggccctctgcctttgcccc

SEQ ID NO: 13097 - DNA, 201 bp, Homo sapiens
caatagtctgcttaattttgaaaacctaaaaagcaagaagcaacttggctgggcaaggaggggcaacaatgcccctgttaagtgggggctctcgggaaaagagacagtgcctactctcagcgcccccgcccatagcaccagcactctcacctgcaccaccaggaccctccctgaccgccttggccctctgcctttgccccc

SEQ ID NO: 13098 - DNA, 201 bp, Homo sapiens
gaggcacaagaatcgcttaaacccgggaggtggaggttacagtgagtcaagatcatgccattgcactccagcctgggcgatagagtgacaatcggtttccaaaaaaaaaaaacaaaaaacaaaaacccagtaagtattattaattcattaattataacaagtgtaccatactcacagaagaagttaataaaatggaaactg

SEQ ID NO: 13099 - DNA, 201 bp, Homo sapiens
cagacaaaaccacataaaacacagtgattgaaaaactgctaggtgagctcaccatgtaactgttaaaacggctaacacatctgtcccctcctgaacaaccaaacaggggacaatgtagaaaagaattctacaaaggcaacatcaggctgtaaaggcaacagggcagggagggccctggatgccaaggtccagagaagaagc

SEQ ID NO: 13100 - DNA, 201 bp, Homo sapiens
gaggcagcagaatcgcttgaacctgggaggcagaggttgcaatgagctgagatcacaccactgcactccagcctgggtgacaagagtgagattctgtctcaaaaaaaaaaaaaaaaaaaaaagtgctacagacaatgaacaccagccaaaggctcaaagagtgttatgaacctcaggccaagtgagtacagacgcacatgc

SEQ ID NO: 13101 - DNA, 201 bp, Homo sapiens
aggcagcagaatcgcttgaacctgggaggcagaggttgcaatgagctgagatcacaccactgcactccagcctgggtgacaagagtgagattctgtctcaaaaaaaaaaaaaaaaaaaaaagtgctacagacaatgaacaccagccaaaggctcaaagagtgttatgaacctcaggccaagtgagtacagacgcacatgca

SEQ ID NO: 13102 - DNA, 201 bp, Homo sapiens
taactttatagtgaagacaccaccttaacaagcaataaaggtaacaaaagcagtgatgggacaaatgggaaccatatgccaaatatccctcaaaaccacattgagggatattcagcaaggtaactgttctgtagtcttcaaaaatgtcaaggtcttgaatgccaagaaaagcctgaggaactgatccagattcaaagagat

SEQ ID NO: 13103 - DNA, 201 bp, Homo sapiens
gagggaggggccctgggcggctggggaacaaagaaggaacatctctcatcttttgaattttacagcatgtgcaaggatttcttttttttttttttttttttcctaagagagagagattaagtaacttgctgagggtggcacacggccagtgtgttcacagagctagaattggagccgtgtcccctggctcctgagtctgct

SEQ ID NO: 13104 - DNA, 201 bp, Homo sapiens
agggaggggccctgggcggctggggaacaaagaaggaacatctctcatcttttgaattttacagcatgtgcaaggatttcttttttttttttttttttttcctaagagagagagattaagtaacttgctgagggtggcacacggccagtgtgttcacagagctagaattggagccgtgtcccctggctcctgagtctgctc

SEQ ID NO: 13105 - DNA, 201 bp, Homo sapiens
aagttttgaataatagagtatatcatttaggtaaatttacaaacacacacacaaatataggcatctagtccaaaatgttaacagagttttaaaaaacaaasagggaacttccagcttcagctccaaagggtgaaggctggaagctgtaatttccatccttccaataagaaaaaactgaaaatcaatggcctttcctggact

SEQ ID NO: 13106 - DNA, 201 bp, Homo sapiens
gctcttgcgctctcagaaagcctttccttcgccacacacagagcaggcctatgctgctgtctgtggcagggcctccttgcgaggctggcccttggttggcttctggaaactcagcttctaaaaagtgccccatgctaatgaggctgggcagcaaactcagccctaccagggtacgatgggagttatggagaacacctgcct

SEQ ID NO: 13107 - DNA, 201 bp, Homo sapiens
ttctcccaggctcttctcttgggtgcacaatttagacatgccctatatagtgcttcaaatgccagctgttcgcacagaaatcagtcaaggaaaaaaatatmcacacacacacacacacacacacacacacagtcactcattctaatggaggaaactccttctactggtgaaacgctgtgtcctaactactttgagagagat

SEQ ID NO: 13108 - DNA, 201 bp, Homo sapiens
ctacctgaccaacacggagagaggcttcaggtgcagacagcatgcggatcagcagggaagaggtggccattcaggaggagggaggaggcagcaaatgcacrcaatgcgcagagcacggcctccgctgagcagcgagcacagacttcagctttgtggtcttaaagaagccctgacatggaaaaatgccccctcccgaaatac

SEQ ID NO: 13109 - DNA, 201 bp, Homo sapiens
tgtgcagggggtaaaactccatgaagctggacaaagtcgacttctgggaaagaacagtttccagggagttgcaagcagatgactcccagagttcacttagrgctgagagtcggcgagctcccactggccagagcagaggggcctctcgctgcacgcatgcagcattcaacagggaccccatggccatgccttgatactggg

SEQ ID NO: 13110 - DNA, 201 bp, Homo sapiens
ctaaaacacaattctattggataagtgtggtggccatgaaaatgtgctctgccgagctcctactgcagggaggaaagtgtgctcctctgcaacgctcctgmtgctcctgaccctcaggatctgctgcctgttcatgccacggccacgcacgttacagaatgtgcctggtcagtgatggagcacagaagagcttctggtgcc

SEQ ID NO: 13111 - DNA, 201 bp, Homo sapiens
accatattctcctccaggaaaaaataacatagtattaaacaagcagtgaaaccccgtctctactaaaaatacaaaaaaattagccgggcatggtggcgtgygcctgtagtcccagctacttgggaggctgaggcaggagaatggcgtgaacccgggaggcggagcttgcagtgagccgagatcgtgccactgcactccagc

SEQ ID NO: 13112 - DNA, 201 bp, Homo sapiens
ccatattctcctccaggaaaaaataacatagtattaaacaagcagtgaaaccccgtctctactaaaaatacaaaaaaattagccgggcatggtggcgtgcrcctgtagtcccagctacttgggaggctgaggcaggagaatggcgtgaacccgggaggcggagcttgcagtgagccgagatcgtgccactgcactccagcc

SEQ ID NO: 13113 - DNA, 201 bp, Homo sapiens
tgaggcaggagaatggcgtgaacccgggaggcggagcttgcagtgagccgagatcgtgccactgcactccagcctgggtgacagagcgagactctgtctcaaaaaaaaaaaacaaagaactcgccacagggcaaagacggtctttgtttcatctcaggatcctccatcaagccgccaacagagctaccaacggccacaggg

SEQ ID NO: 13114 - DNA, 201 bp, Homo sapiens
cccctccacccctgcagatgccctctctcaagtgggaacagggtgtgtgtcaccctcctcgtgaggactggtaggaattagtataaatgctattaaaacagggcttttagtgctgatctgcattcaaaatagagatgcttggcctttgattgaaaactgcattacatctcctttcttctgaatccgcctctggacctctgg

SEQ ID NO: 13115 - DNA, 201 bp, Homo sapiens
gcatatcatacacccacagaagataagtgagcttgaaggcagagcagcagaaactatccaaaattaggcacagaaagaaaaaggccaaaaacaaatggacagagtcacagggacctgtggaaaatagcaagtcacctaatgcatggatacataagagtccccaaaagggggaggatagaaaaaaatctgaagaaatgataa

SEQ ID NO: 13116 - DNA, 201 bp, Homo sapiens
catatcatacacccacagaagataagtgagcttgaaggcagagcagcagaaactatccaaaattaggcacagaaagaaaaaggccaaaaacaaatggacagagtcacagggacctgtggaaaatagcaagtcacctaatgcatggatacataagagtccccaaaagggggaggatagaaaaaaatctgaagaaatgataac

SEQ ID NO: 13117 - DNA, 201 bp, Homo sapiens
agctacagcctaggtattgctagggcaagctaagagcgggggaggttctaacgggaggctgtgggggctgcactttaagctgcgtgtgtttgaggtccagrgctccaatctgctttcacagggagacatgacagcacaaaagacacctatttcaggagggagaaagggtggaagatacttaggaagttcctttttccagcg

SEQ ID NO: 13118 - DNA, 201 bp, Homo sapiens
ctgcactttaagctgcgtgtgtttgaggtccagggctccaatctgctttcacagggagacatgacagcacaaaagacacctatttcaggagggagaaaggrtggaagatacttaggaagttcctttttccagcggagaccgattaagtaatggcatttattcatctatctaacagacattcataaacacagtaagtgcaag

SEQ ID NO: 13119 - DNA, 201 bp, Homo sapiens
atggagcgctccaacacaacaccttgtcctgtttaaacataggcaaacagaaattgaaaatcagacagatagcaaagcactgtcaactgatcactgcattycagagaaaagaaaataacaatcatttacaattccatttccacaccaaaatactgaaaagaacatagacatatttgtaagtgggaaaccattttcaaaaac

SEQ ID NO: 13120 - DNA, 201 bp, Homo sapiens
agagtcctttattagctggcgaccgagagacggctaacgctcaaaattctctcagccccgaggaaggggcttgattaacttttataccttggtttaggaaggggggggggtctagttaaaacaattttacagaagtaaagtagtcaaaaagttaaaagggtaaatggttacaggaaagtaaacagttcaaggtgcaggggc

SEQ ID NO: 13121 - DNA, 201 bp, Homo sapiens
atttcagtttttgcaaagacagcctctaacacttaacagccctactactgctctaggcagttacttatcagagaactacagtaatgaaagaagtgccacayaaaaacattctcaaatgctactttgtaagaagaaagcagaaaagaacttatttggtgagtgaatgtgattaacttgatagtagatatatctcaggaaatg

SEQ ID NO: 13122 - DNA, 201 bp, Homo sapiens
gatctactttaacaatgaacagagactgtatctgttcctaaaacaggagttaaaaacacagcaagaccaagtggtaagaaataaatgcttgaggcttaacsagtctatgagggcggcaaagtaaaagaaactcttgccctgtgcacaggctgaaaccagccattattttgctgatgttgtagctagaaactccatttgaga

SEQ ID NO: 13123 - DNA, 201 bp, Homo sapiens
cctcacattctctgcactgggcattgtgctgggcatgtgagggtgcattagagcttgactggttcaggaggacatgttaaaagccagaatgttctcatggmtggcttgacagtgacaacagcaggaccatttcctcgtttcccttctcctgactacactgcccccaagccaagggcgtgacagaccacagccatcactgtc

SEQ ID NO: 13124 - DNA, 201 bp, Homo sapiens
ataggagacagaggtcttaaacatccctgatgaacagggctggcacagaaacattatttgttctcacacagcaatatgaaaggtcacaaactatttgacayatttgcacaagagtggtcatgagagatcaggacgatgtgacagtttcgttcaacacacataactgaacagacattagctgaagccccaccaggagccagg

SEQ ID NO: 13125 - DNA, 201 bp, Homo sapiens
accatttcctcgtttcccttctcctgactacactgcccccaagccaagggcgtgacagaccacagccatcactgtccacaggagcaaggtacatgagccaygtcagcagctgcacataccatcgccaaaggcagtgcccgctgcacggaaggacaacgaagcccagggcctaaccgagcacaggcagaaggcatctttaca

SEQ ID NO: 13126 - DNA, 201 bp, Homo sapiens
catcaccccttgggctttcccaaggaaagcatgctcacggtcagtgctggacccccaacgcctgcagactccagcccaggccagtcctcagacttcagcaracactcagcagatgccgacaggtatctcctgccaccttgccatgggaacctcacactcaggaatccaacgcccaaacatgaagccacatcggtccactgc

SEQ ID NO: 13127 - DNA, 201 bp, Homo sapiens
aaggccttccctactctgtcttgtgtacctctgtgtctcagctaacactgacactgggagctagcagtgttggagctgagtaaataagtatatgttgaacrcgggaatggccaaatgttggtgaaactaagttgatactcattaacacattcacaattaaggtaatgaggagaaagacatgtacgcctaagatctgggtca

SEQ ID NO: 13128 - DNA, 201 bp, Homo sapiens
ttaaaagccagaatgttctcatggctggcttgacagtgacaacagcaggaccatttcctcgtttcccttctcctgactacactgcccccaagccaagggcrtgacagaccacagccatcactgtccacaggagcaaggtacatgagccatgtcagcagctgcacataccatcgccaaaggcagtgcccgctgcacggaagg

SEQ ID NO: 13129 - DNA, 201 bp, Homo sapiens
tgcggcccggcagctgtgggggaaaaaggcattggtgcattctgtttaacgtgaatgaatgtttccccagctcatagttcaatgtctacccggcagatgcstgtacttcatgagttccttcagcaatgctggtgagcacatgatctgtggcaggtgtctcctgtgagtgcaaggatgccacaggtacacaaaccacaaccc

SEQ ID NO: 13130 - DNA, 201 bp, Homo sapiens
acttcatgagttccttcagcaatgctggtgagcacatgatctgtggcaggtgtctcctgtgagtgcaaggatgccacaggtacacaaaccacaacccagcyctgcctgccagaagcttctgtcctagggctgggagccacaaatggaaacgaactactgagtgttctcattaatgtcaggagggtgacaagagccacagga

SEQ ID NO: 13131 - DNA, 201 bp, Homo sapiens
ccgtgacgtcacggccggggtgcccgcggcgcctgtcgggaaccttccagggggcggggccgcgccgaggccctcgggggcttccgcggagacagccagtkcgctgccagggtcctgcgggttggggcgagggccgagaggtgggagttggaggtgaacgtgggggcagcatgctggctgcccggcccctgcctgggttct

SEQ ID NO: 13132 - DNA, 201 bp, Homo sapiens
cgccgaggccctcgggggcttccgcggagacagccagtgcgctgccagggtcctgcgggttggggcgagggccgagaggtgggagttggaggtgaacgtgsgggcagcatgctggctgcccggcccctgcctgggttctgagttgctgcggtgtcgcgggagctgaggccgcccagggcgtggagcgacttctgcgtctcg

SEQ ID NO: 13133 - DNA, 201 bp, Homo sapiens
gcaaagagaggccacgtggctccccagagcaccaggagagagcagtgatctgctgatcttctgagttttaaagtagaaaacttctgtgtgcttgcatttasatataaccatgaagtaggaatgaggaagagagtatatgctgaggaacagagccgggcagctccagggtgggcaaaacccaaagctctgagtccaggggca

SEQ ID NO: 13134 - DNA, 201 bp, Homo sapiens
agctgcaggcctacaaaacatcaaagagcaagaggaaagggctgcagggcagctgaggcagagagagagtggagctggacttggatggggagttttggtgyaaagagaggccacgtggctccccagagcaccaggagagagcagtgatctgctgatcttctgagttttaaagtagaaaacttctgtgtgcttgcatttaca

SEQ ID NO: 13135 - DNA, 201 bp, Homo sapiens
gatcatgcgggctgatccctcatgaatggcttgggccatctccttggtgatgagtaggctcttactctgagttcacacaagacctggtcatttaaaaataygtgacactctaccaccaaagatctggtcatttaaaaatacgtgacactccgccaccaaagagctggtcatttaaaaatatgtgacactctgccaccaaag

SEQ ID NO: 13136 - DNA, 201 bp, Homo sapiens
tttaaaaatatgtgacactctaccaccaaagatctggtcatttaaaaatacgtgacactccgccaccaaagagctggtcatttaaaaatatgtgacactcygccaccaaagatctggtcatttaaaaatatgtgacactctgccaccaaagatctggtcatttaaaaatatgtgacactctgccaccaaagagctggtcat

SEQ ID NO: 13137 - DNA, 201 bp, Homo sapiens
tccgccaccaaagagctggtcatttaaaaacatgtgacactcctccgccaccaaagagctggtcatttaaaaacatgtgacactcctccgccaccaaagakctggtcatttaaaaatatgtgacagacactccgccaccaaagatctggtcatttaaaaatatgtgacactccgccaccaaagatctggtcatttaaaaat

SEQ ID NO: 13138 - DNA, 201 bp, Homo sapiens
acatgtgacactcctccgccaccaaagagctggtcatttaaaaatatgtgacagacactccgccaccaaagatctggtcatttaaaaatatgtgacactcygccaccaaagatctggtcatttaaaaatatgtgacactctgccaccaaagatctggtcatttaaaaatatgtgacactctgctgccccattctcttgctc

SEQ ID NO: 13139 - DNA, 201 bp, Homo sapiens
ctgccagattaatcctaagtgcctcctggatcaagcgtccacacttcctccctattgccagccaccctcctggatcccagaccgtcggttctgtatctctygctgttcccaaccaaagccacagcaccagccaggaaaatgtcatcttaaccatcactccacatcatccatttagtagtcctaccttgagctctgggtctc

SEQ ID NO: 13140 - DNA, 201 bp, Homo sapiens
ggaacctttactctctggctctttaaaggaaacctttgctgatcactggcctaagaaagtacaggaaggtaacaacaagacagtaaagctgagtccacgaygtggtttaagttcacttagcccacaattacttcctaagtgcccacaggtacgaggtcctgtgccggctaagtgcctacaggtgccaggtcctgcgcctgg

SEQ ID NO: 13141 - DNA, 201 bp, Homo sapiens
atcaaatgagagtgtggatgtcccctccaaatctcatgctgagatgtaactcacagtgtcagaggtggggcctggtgggaagtgtttggatcatgcgggckgatccctcatgaatggcttgggccatctccttggtgatgagtaggctcttactctgagttcacacaagacctggtcatttaaaaatatgtgacactctac

SEQ ID NO: 13142 - DNA, 201 bp, Homo sapiens
accttcccaccacactcctgcctgaagagcctctgcacctgccaagcccctgccctctgctcaccccacggcccacaggacccaatcctggcctcacttargcctcatcccgagagaggccctttgtcacccctagctactcaccaccctgttactcagggttacttctctccctggcctttgtgacctgacgcagtttta

SEQ ID NO: 13143 - DNA, 201 bp, Homo sapiens
ggcacagagaggtttctagagaaggaccattagacagccgtcctatggtcagcgctggattctgtgttgttctgagctaagagcttgtcctcatcagggasctggtccacaagggactttcaggagctgatgcagaatgaccagttgctcagtggtccagacccactccccatcttcctaaggtggctcttggagagccca

SEQ ID NO: 13144 - DNA, 201 bp, Homo sapiens
aagcagggaaatgggaagcagcatggccgcccggccacacttgcccaaatgtgagtcctgccctcccagaagctgcaggacctcagaaagccactgtgtcmaactgctcatttgcaaatgggaataagaataatagtgtcttcttgtggcaacagcatagtgcccagcacacagaaggtgctcggggtgacctggtattgt

SEQ ID NO: 13145 - DNA, 201 bp, Homo sapiens
agtgtttattcatctttctctgctgaacatgcatgtcattgaaaacaccagaaaatcaaacagacgaatgtcctcagcactacaaattacatacttcccaytccatcaagggaatgcaaccacacagggtcagacgcaaacacaggggatgatcagagcacccgagtccacaccatgccgacacggagccctgcatggttg

SEQ ID NO: 13146 - DNA, 201 bp, Homo sapiens
tggcacagagaggtttctagagaaggaccattagacagccgtcctatggtcagcgctggattctgtgttgttctgagctaagagcttgtcctcatcagggwcctggtccacaagggactttcaggagctgatgcagaatgaccagttgctcagtggtccagacccactccccatcttcctaaggtggctcttggagagccc

SEQ ID NO: 13147 - DNA, 201 bp, Homo sapiens
agaacaagtgaagcctaaagaaagcagagaaaaaataataaaactagggtatacatcaataaaacagaaaacaactggataaatcatcaaaacaaaaaccwggttcttcgaaaaagttaataaatatgaagggaaaattcacaaagagcaaataaatagccaataaaaatataaattgaagtttagtgtttataaaatgca

SEQ ID NO: 13148 - DNA, 201 bp, Homo sapiens
acaattcgagagagtattagaaaacactagcggcgtgaggtgactactgacaatcacctcctctgttttctggctcatgattttcctaaagcaaagcctcmggctcccggcttctatttatatccacatgtaaagccccagatcactcgggcacctgcttccattcatggaattctggccagccagtggctgatgcctaca

SEQ ID NO: 13149 - DNA, 201 bp, Homo sapiens
gtggctgatgcctacacaagcttttcttcaaaaagccccaatttctgacagccatggcagctttccctccacccctattttgccaaacccccaaatcttgsagatttatatccagtgtgagcacggactatgcttcttcccagaaagtagccgcctgcttgcttctttgcattgacatttgcactgctaagaacagccaat

SEQ ID NO: 13150 - DNA, 201 bp, Homo sapiens
gaagtccaacatggaatcctggaaaatgcacgattattttgatcctggtttgttggtgctgttgttttagttgtaagagctttcgtgagacgaacgcatgyactgctctgaaataaggaaatcggggcatctcctcacctcttcttgaggcttctatgtggagagaagaattggacagtgtttattcatctttctctgctg

SEQ ID NO: 13151 - DNA, 201 bp, Homo sapiens
actactgagtgttctcattaatgtcaggagggtgacaagagccacaggagggggacagagagcaatgggtggcacttaggggaggccctgagcagggacasccacgcagacacaggggtggggctgggacccaggaaccacagttcaccaactgaaacaccgagttctctctgaaaaagccccgcgtgaaattccctctga

SEQ ID NO: 13152 - DNA, 201 bp, Homo sapiens
ggggaagcactgcaggactgaccctagcgggagccactgaacatccaggagcgacaggacgacagagcccaggaggagcggatgctgccagagaggccagyggggggctgagcttggcagtgacggagctgcagaaaggatgttacagcccccacttctcccaccatctgggagagatcaggggctcaggtggcggtccac

SEQ ID NO: 13153 - DNA, 201 bp, Homo sapiens
ctagcgggagccactgaacatccaggagcgacaggacgacagagcccaggaggagcggatgctgccagagaggccagcggggggctgagcttggcagtgayggagctgcagaaaggatgttacagcccccacttctcccaccatctgggagagatcaggggctcaggtggcggtccacagaggccaacctcacagggcaca

SEQ ID NO: 13154 - DNA, 201 bp, Homo sapiens
gagcgacaggacgacagagcccaggaggagcggatgctgccagagaggccagcggggggctgagcttggcagtgacggagctgcagaaaggatgttacagsccccacttctcccaccatctgggagagatcaggggctcaggtggcggtccacagaggccaacctcacagggcacagggagatctggggggcaacaagagc

SEQ ID NO: 13155 - DNA, 201 bp, Homo sapiens
gggggctgagcttggcagtgacggagctgcagaaaggatgttacagcccccacttctcccaccatctgggagagatcaggggctcaggtggcggtccacaraggccaacctcacagggcacagggagatctggggggcaacaagagcccctgccagcacaaagacgcctgttcatgagggtaggcggccagcacagggctg

SEQ ID NO: 13156 - DNA, 201 bp, Homo sapiens
tctgctgtgaaaaggtctttctttactcgtctgtgtacccatgtcaccagcatgttcatcaaatgagagtgtggatgtcccctccaaatctcatgctgagmtgtaactcacagtgtcagaggtggggcctggtgggaagtgtttggatcatgcgggctgatccctcatgaatggcttgggccatctccttggtgatgagta

SEQ ID NO: 13157 - DNA, 201 bp, Homo sapiens
gcaaaagaagaaagagcgcctaacagaaaaaggaacaaacccctccaatgctcatcctctgcaatcccctctactgtacaatgcgaacggagtttccctcrctggatctctaaattcaaggcattttggactcattacattcacagggctctgataagtttaacactttcaggaggctctttccctgtattccattttcca

SEQ ID NO: 13158 - DNA, 201 bp, Homo sapiens
agaaagtttgtgaagggcataaagttgctgtattttgtaagactgcattaattgtaagactacaagttccctctccagaggaaactgctgctagctttccwtatgcattctatctaaacacttccatgcatgtgtcaataatctacaagtacgtatcttcttactgttaacacaaatataaggataatttttgaagtgatc

SEQ ID NO: 13159 - DNA, 201 bp, Homo sapiens
aaaaatgaagttcatattttaaatgttaacaaatatcaatgtagggaggtgacatggttctctttacagtttgaaaaacctaagaaaatgctagaaaatgygaaagcaatcagtggcctggaccatgtgtagtatagagagcaacagcgccatctatgcttaatttggcaacattacatgtagtcccggaaaatcttttaa

SEQ ID NO: 13160 - DNA, 201 bp, Homo sapiens
gaagggaaaattcacaaagagcaaataaatagccaataaaaatataaattgaagtttagtgtttataaaatgcaaagtaaaacaaatacttgtatgggtawcagaatcgaaagtttttgtttgcattttgtttaattatattctttatagggaaattcagagaaccaggtccaagtatgaatactggtacacatattccgg

SEQ ID NO: 13161 - DNA, 201 bp, Homo sapiens
caaatacttgtatgggtatcagaatcgaaagtttttgtttgcattttgtttaattatattctttatagggaaattcagagaaccaggtccaagtatgaatwctggtacacatattccggagaatcattttgcaaaaactcaatagctgtaaaatgcgttcatatactctgaccacttttataccttaagtaacctgaaatt

SEQ ID NO: 13162 - DNA, 201 bp, Homo sapiens
ttttcactgcttgagaaagttgctcaatcaatgtgtcagtgtccctcacaggaggaagagcctgtgcatggatttctccagagtccaacatgtcttttttygtattgatctgtctgcgtatctgtcctcattcactgtgataaatcttattctgaacagagataggcagctaccacagagggagcccccaaggctccaacc

SEQ ID NO: 13163 - DNA, 201 bp, Homo sapiens
aaacctagaaatgagttggaatgtgggagaagcccaaagtagaagatggaaggtgatggagggcgaaaagggtggagaaatcctacctgaccaacacggaragaggcttcaggtgcagacagcatgcggatcagcagggaagaggtggccattcaggaggagggaggaggcagcaaatgcacgcaatgcgcagagcacggc

SEQ ID NO: 13164 - DNA, 201 bp, Homo sapiens
tattaatgctgtactaaaaacatcaaacagaagtgaacttcttttgagagacagagtctctgtcgcccaagctggagtaccgtggcgtgaacacagctcaytgcagcctcaacctcccaggttcaagtgaccctcccaccttaacctcccaagtagctgaaactataggcatgcaccaccatacccagataatttttaaat

SEQ ID NO: 13165 - DNA, 201 bp, Homo sapiens
ggccaagaacagagctgccatctgtaggcaccaacttcctaatttacatccaaacgttgaggagagggaagttgagtgccccggccatccttgtgcctccrggccctcgagaggcaaagtgttggtgcagtctgcacagagcatcctgggtagaggcaggaagcagcacagggcaggctcaggccaagggctcgagactta

SEQ ID NO: 13166 - DNA, 201 bp, Homo sapiens
tgcctccaggccctcgagaggcaaagtgttggtgcagtctgcacagagcatcctgggtagaggcaggaagcagcacagggcaggctcaggccaagggctcragacttaacacaaaaggcagatccccaaatagctactcatgtttcctgcattttcacaagtcaaagaccctcaaattactccaatcttgatttataaata

SEQ ID NO: 13167 - DNA, 201 bp, Homo sapiens
acaaaatcatctctgaattttgtagaatttatagccctaaaagaaatcaaagtcactcactccagatacatctcctgagtgcacgctggatatgaggcctrtaccaggaactgggcgttgcagtgatgagaagcagcagggggtgggtggtggaggacagacccaagcaggatgagattcccgggtggccagcaccagcca

SEQ ID NO: 13168 - DNA, 201 bp, Homo sapiens
ttttccatctctttaataaaaatggtagagtggatgacccaagattctgtgacatctgtaattttcagatcgtagaaaccgaattacttgaaagaaactcraaacctcatggccaggggagtgtgatgatgggtttgactggcactgctttcaggtgataaaacagtgatgtttgttaagaccagtgggaatctaactgac

SEQ ID NO: 13169 - DNA, 201 bp, Homo sapiens
ccagaaaatacacattcctatgagagttagctcattgtacctcttaaaatcccacaatacaaatattttggaaaaggctgcaatgctctttatgcattcayaagcaacaaatacaaaaacagtgaagcatcaccatgtatcagcacgtgacagagagaagggctaacacaggaggaactgctcaaagacaggagacacaga

SEQ ID NO: 13170 - DNA, 201 bp, Homo sapiens
gcagtttgatcttggtctacaattcagcacttaaaataatgcatactgcatagagtacatctggtactcattcttcaatgtgtgacaaatgacccctacawcaagtggctcccatcaatccatacggcttgagctgtcagataagatctactttaacaatgaacagagactgtatctgttcctaaaacaggagttaaaaac

SEQ ID NO: 13171 - DNA, 201 bp, Homo sapiens
ttgcgggcggcaagctcacaggtggagtaccggcaacaccaggacacacaagcagccagaagcaggcgcctcctccacagaatggtcacctggcttgcttyggcctcctctttcattaatcaacagtacttcctctgagctcccagattccagctttccactggctccagccaccccagtctacagatgaaaatgccgtca

SEQ ID NO: 13172 - DNA, 201 bp, Homo sapiens
caaggagagccttcacttctggtgggagtcaaatggcacagtcactctggaagatggcttggcagcttcttagaaaactagtcttactacatgagtaatcrctcttccaggtattacccaaatgatataaaaatgtatttccaaaaagaaatctgcatgtacacgattacagcagctttattcataattgccaaaaacttg

SEQ ID NO: 13173 - DNA, 201 bp, Homo sapiens
ggcaactatggaaatgttaatgagatctgtggttgtcaggggttggagaaaaagaagggtttaataggtaaagcagaggggaattttttaaggcagtgaakctactctgtacgaacctataatggtggagacatgctattacacacgtgtcaaaacctatagaaccttatagcacaaagaaaaaatccatagaaccttata

SEQ ID NO: 13174 - DNA, 201 bp, Homo sapiens
ggatcaacaaaaccaaaaatcataaacccttctattcatatgaaaatctaagatccactctgctgtgaaaaggtctttctttactcgtctgtgtacccatrtcaccagcatgttcatcaaatgagagtgtggatgtcccctccaaatctcatgctgagatgtaactcacagtgtcagaggtggggcctggtgggaagtgtt

SEQ ID NO: 13175 - DNA, 201 bp, Homo sapiens
ccggcgcagtggctcccgcctgtaatcccagcacttctggaggccgaggcaggtggatcacctgaggtcaggagttcaagaccagtctgcccaacatggcraaaccctgtctctactaaaaatacaaaaaattagccgggtatagtggtgcatgcctataatcccatctactcaggaggctgaggcaggagaatcgcctga

SEQ ID NO: 13176 - DNA, 201 bp, Homo sapiens
gctccaacccacagcacacaggctcaggatgctgcaccaggtaaggaccacatggagctgagctgctggcagaggggaggaggctgtgggaaccaaggaarctaccaaagtgaacttgggtctccgaactcaccacagaagcggggactccaggaattctgtggcaggttgtttctttctccctctactttatatgaaaaa

SEQ ID NO: 13177 - DNA, 201 bp, Homo sapiens
cctgcagtgaccaactcaagactatgaatggtcatcaccgcacaatgacatggtggctgcccctgtttcacgtagggatgcacgttttcattctggacagrgaacaacggtgaatgccgaccgtcctctgcattctctgggtggacagtctggggctgttttccacctggccctttagatctcctctctaccattcctcca

SEQ ID NO: 13178 - DNA, 201 bp, Homo sapiens
acaccagagcaccctccacacatttaggatgtaaacatacagggtaagtaaatactccaagaatgtacaagctatttattctcatactgaaatcagcatckgacccctacaatggtaccaaacaaacttcaccaactctgctgaccatcttcaacagaccactggttgattaaattacgtagtacaggtaaagtgcttgta

SEQ ID NO: 13179 - DNA, 201 bp, Homo sapiens
tcacttgacaaaattaaatactcatttatgataaaaacaaaaactgctctcagcaaataaggactaaaggggagctgcttcagcttgataaagcacatgcrtgaaaactctgcatcattgtacttaatcatgaaagactgaatgcttgccttctaaggaggaaacaaggcaaggatatctgctctgcccactcttattcaa

SEQ ID NO: 13180 - DNA, 201 bp, Homo sapiens
tttctcccaggctcttctcttgggtgcacaatttagacatgccctatatagtgcttcaaatgccagctgttcgcacagaaatcagtcaaggaaaaaaatayacacacacacacacacacacacacacacacagtcactcattctaatggaggaaactccttctactggtgaaacgctgtgtcctaactactttgagagaga

SEQ ID NO: 13181 - DNA, 201 bp, Homo sapiens
ttgtttgtgagaattacacattcaagccacgattctcaaaccaggcgctgtgcatcgacaggaggactcgctcgaatgcgtgtctgggccccatcccctgygtgtctagtccaggaggcctggactgaagcctgagaacttacattcccaacagcagttcaaatgatcctgacaccgagaccacactcggcgaaccatcac

SEQ ID NO: 13182 - DNA, 201 bp, Homo sapiens
tgcacaagttaagtccttgagaaaggggctgccagtgaaagagccaagatggagtctgtctggctctcttagctaagggagagtcaattcaggtggaaacmgggctaggtgattaaaggaaaagggagagtctgaaaacagttagtaaaaaccaggttgggcattacagttttactggttcaagggaagtattactatata

SEQ ID NO: 13183 - DNA, 201 bp, Homo sapiens
aggaggacatgttaaaagccagaatgttctcatggctggcttgacagtgacaacagcaggaccatttcctcgtttcccttctcctgactacactgcccccragccaagggcgtgacagaccacagccatcactgtccacaggagcaaggtacatgagccatgtcagcagctgcacataccatcgccaaaggcagtgcccgc

SEQ ID NO: 13184 - DNA, 201 bp, Homo sapiens
tttttaggcaccgaaagaggcttagggttttaaaaagtatgagaaatagtataaaaatcttcaattcaagcattattcaaacaatctgagtttaactggaygtgaatgagtgtggcagacattccttacacacgaatatacccaaggagcgcagaatgacaagccataggatgagtgaaaccacattttccatgtgctttc

SEQ ID NO: 13185 - DNA, 201 bp, Homo sapiens
tagggctgggagccacaaatggaaacgaactactgagtgttctcattaatgtcaggagggtgacaagagccacaggagggggacagagagcaatgggtggmacttaggggaggccctgagcagggacagccacgcagacacaggggtggggctgggacccaggaaccacagttcaccaactgaaacaccgagttctctctg

SEQ ID NO: 13186 - DNA, 201 bp, Homo sapiens
taccgggtgggcttcactctgctggggcaagcaatgggttatgccaagcatgactggctcccctctctctagatgcactaaggagcttcaaaatactgcamagttctggggtgatttggaaattccagtttccaactcctattttccattataacatataaatgctaatcaattctgcttggagtttttcattaattttaa

SEQ ID NO: 13187 - DNA, 201 bp, Homo sapiens
ctgcacagcccgctgcgggtaggggatccccagctacaaggttagacgaaacaattctgttcacctcgcctctgacaaaggccgactttacttttctttarttacttgtcttttgcaattttcataaagcaaaacctgaactcttttctaaaaagattcttgtcttgattgtatttactgtttcttctaacgtgtaattat

SEQ ID NO: 13188 - DNA, 201 bp, Homo sapiens
ctggggggcaacaagagcccctgccagcacaaagacgcctgttcatgagggtaggcggccagcacagggctggctgagacggaaagaggagtgttgctccrcaggaccacctcgttgcggagccaggagaaagcgctcagcacggtgtgtgtcgcccagcgatggcaggtgggaaaatgatgagttttttcatattttcaa

SEQ ID NO: 13189 - DNA, 201 bp, Homo sapiens
gcacagaaaaaaatatgaatagcatcttcaacacggttgtctttaggaggtgggttcgttcaacttcactgtagatttccataaagcgtgaattgaggatrattaatgtaaattatttctaagatcagaaaaatactacttaaaaagtaaaagaaaaaaagcttagtattaaagaacaaaaatattaatggagaaatgtaa

SEQ ID NO: 13190 - DNA, 201 bp, Homo sapiens
tgctctcaccctgcttcccaccctcacccttactcctgtcagtacacccacttctcaggtggtccccaccttgctctatgccacctgtcctttagccaacrtgatctgctttcccccagcccagcactcaaacgactctggctaacatcaccagcccccgaaaggtgaaacgtgacagtcacttctcagttcccatcagag

SEQ ID NO: 13191 - DNA, 201 bp, Homo sapiens
accaggagtcaggaaggggctctaaccttggctttgggacccagctatgtggcatctgctcactcaggagtacacccatctgtgagtgagtaccatcctcrgctctatttcagaggctgtcacaaagttcaaacacgacagtttatgtggaagtgccctgcttacactgcccacataaaattccaattcaaattgacaacc

SEQ ID NO: 13192 - DNA, 201 bp, Homo sapiens
tacaatagccacaataattttgaagcagaagaataaagtgggaggagtcactcttccagtgttaagatttactacataatcatataaatcaagactgtgtkgtatggatggagggtgtgatattgatagatacgtagatcaatttaacagaacagaggatccagaaataagccagcacaaatattctcaactgacgcagta

SEQ ID NO: 13193 - DNA, 201 bp, Homo sapiens
tctacatgagatctggagggacagacatcctaactacatcaatgcccatctaaaggcgggggggagggtggcacagccagcctccagctttctggcccagratacagtgtggatacagacggttttgtttgggtgccaggagaattctgggacacacacaaaaaaagaaaaacccagctccttcaggagtttgaaatctga

SEQ ID NO: 13194 - DNA, 201 bp, Homo sapiens
gcacattactaaaataaatacagtaggcctttagaaaaactcttcagcataatgtaagcctcaattaaaccacaccacaccaaacagggcccagagcagcrtgtgtgcacgtgtgcagtttcgacgtgcccgcacgcacatagacgtacgatggggaaattcccatggaaacacttttatttctggaagtcagaagaaaaa

SEQ ID NO: 13195 - DNA, 201 bp, Homo sapiens
gagcaatgggtggcacttaggggaggccctgagcagggacagccacgcagacacaggggtggggctgggacccaggaaccacagttcaccaactgaaacamcgagttctctctgaaaaagccccgcgtgaaattccctctgaagagggcctgcagaggccgggccgctggctgtaaggggcccttggcggagtaggaaagt

SEQ ID NO: 13196 - DNA, 201 bp, Homo sapiens
ggccttttaagtagacatgggcagggttcaggaaaaccagcaaaggagggggaagcactgcaggactgaccctagcgggagccactgaacatccaggagcracaggacgacagagcccaggaggagcggatgctgccagagaggccagcggggggctgagcttggcagtgacggagctgcagaaaggatgttacagccccc

SEQ ID NO: 13197 - DNA, 201 bp, Homo sapiens
ggacgacagagcccaggaggagcggatgctgccagagaggccagcggggggctgagcttggcagtgacggagctgcagaaaggatgttacagcccccactwctcccaccatctgggagagatcaggggctcaggtggcggtccacagaggccaacctcacagggcacagggagatctggggggcaacaagagcccctgcca

SEQ ID NO: 13198 - DNA, 201 bp, Homo sapiens
gacgacagagcccaggaggagcggatgctgccagagaggccagcggggggctgagcttggcagtgacggagctgcagaaaggatgttacagcccccacttmtcccaccatctgggagagatcaggggctcaggtggcggtccacagaggccaacctcacagggcacagggagatctggggggcaacaagagcccctgccag

SEQ ID NO: 13199 - DNA, 201 bp, Homo sapiens
agctggtcatttaaaaatatgtgacactccgccaccaaagagctggtcatttaaaaacatgtgacactcctccgccaccaaagagctggtcatttaaaaayatgtgacactcctccgccaccaaagagctggtcatttaaaaatatgtgacagacactccgccaccaaagatctggtcatttaaaaatatgtgacactccg

SEQ ID NO: 13200 - DNA, 201 bp, Homo sapiens
ccaataaaaccctcttaaataaattatccagtctcagacatttatttatagcaatgcgagaacagcctaatacaacccccacaccttagtctgtgcatggwgctcaccccaggggccctgcaagaagcagggaaatgggaagcagcatggccgcccggccacacttgcccaaatgtgagtcctgccctcccagaagctgca

SEQ ID NO: 13201 - DNA, 201 bp, Homo sapiens
gccctgcaagaagcagggaaatgggaagcagcatggccgcccggccacacttgcccaaatgtgagtcctgccctcccagaagctgcaggacctcagaaagmcactgtgtcaaactgctcatttgcaaatgggaataagaataatagtgtcttcttgtggcaacagcatagtgcccagcacacagaaggtgctcggggtgac

SEQ ID NO: 13202 - DNA, 201 bp, Homo sapiens
ccatggctgccagattaatcctaagtgcctcctggatcaagcgtccacacttcctccctattgccagccaccctcctggatcccagaccgtcggttctgtrtctctcgctgttcccaaccaaagccacagcaccagccaggaaaatgtcatcttaaccatcactccacatcatccatttagtagtcctaccttgagctctg

SEQ ID NO: 13203 - DNA, 201 bp, Homo sapiens
tatctatgaatcttaaattctggttcaaattccaacatctctgaccacctttcttaatcatcccatcaacgctgatgagaagttcttcacactgcaattcmagacttggttacataacaatgtgcaatgccctctgactctgctatatttgaactcctcgggttaatctcatgcctgctgtaacccccacgtggcttagga

SEQ ID NO: 13204 - DNA, 201 bp, Homo sapiens
ctatgaatcttaaattctggttcaaattccaacatctctgaccacctttcttaatcatcccatcaacgctgatgagaagttcttcacactgcaattcaagrcttggttacataacaatgtgcaatgccctctgactctgctatatttgaactcctcgggttaatctcatgcctgctgtaacccccacgtggcttaggatgg

SEQ ID NO: 13205 - DNA, 201 bp, Homo sapiens
tggacggtaggtatagcgtcaggagcgtcctagtaaaaaccgcgtcgctcatacacggttagtgatccaataatgcaaatgcccctccaagaaactgctgscaggataacaatgatcgtttgctttcctaagtgtatttatgtgcgtttccacatgggtaggcaaatggctgtaatgtacatacttacagataagatcgtt

SEQ ID NO: 13206 - DNA, 201 bp, Homo sapiens
caaaaactaatagaacccaagggagaaatagacaaatccagcgctgttggaaatttaaacccaactctcagtaaccgacagatccagcagagagaaaatcygtaaggagaccgatgaccccaactctgagtaaccaacagatccagcagagagaaaatcagtaaagataccgatgaccccaactctgagtaaccgatggac

SEQ ID NO: 13207 - DNA, 201 bp, Homo sapiens
gtttttctgccaaaagcacagctcttgcgctctcagaaagcctttccttcgccacacacagagcaggcctatgctgctgtctgtggcagggcctccttgcraggctggcccttggttggcttctggaaactcagcttctaaaaagtgccccatgctaatgaggctgggcagcaaactcagccctaccagggtacgatggga

SEQ ID NO: 13208 - DNA, 201 bp, Homo sapiens
gtttctttctccctctactttatatgaaaaacacctgcagtgaccaactcaagactatgaatggtcatcaccgcacaatgacatggtggctgcccctgttycacgtagggatgcacgttttcattctggacagggaacaacggtgaatgccgaccgtcctctgcattctctgggtggacagtctggggctgttttccacct

SEQ ID NO: 13209 - DNA, 201 bp, Homo sapiens
aaaagaaaaaaagcttagtattaaagaacaaaaatattaatggagaaatgtaaacacatcatgcatctacaatcagagtataataatataccataaacagkatcataacatagtccctaaaactttagtacttatgatatatacacatggttctgagcctttcaaattattcccacatttaatccccacaacagtcctatg

SEQ ID NO: 13210 - DNA, 201 bp, Homo sapiens
tcaaaatagagatgcttggcctttgattgaaaactgcattacatctcctttcttctgaatccgcctctggacctctggaacgggcacatcgatgtaaatcmccaggtgggggggcaggtaatcgcagatggtgacgctcttcacctcgttgtagtggtccacacctggcacataggagaaaggggcgctgtcacctaccag

SEQ ID NO: 13211 - DNA, 201 bp, Homo sapiens
aaaacagggcttgtcgcctccactgtatttacaaaccaaaggtctgaggcccagagaaattaagctacttacacagagtaaaacagcagcatttaaactgkgaccttaatcatcctaaaagacagatctttagcacatcttagccacatttaagggttcacttttgctcctgaggcaagacgtaggtcacgcaagatggag

SEQ ID NO: 13212 - DNA, 201 bp, Homo sapiens
cacacgacggccagcaggcgcctctcttaagacgccctgggtcagcttccccagggtttttcaattaaagttgtcatttaatgttttacccaaacacaggmccagccacgcaggtctgttcacagcagtactgacagaggaagggctgggtttgggacagtctggctccattttcatctttgcaaatagaattttaaatca

SEQ ID NO: 13213 - DNA, 201 bp, Homo sapiens
ggcacacagcagacatgcactaaatatttaatgaatacgttaacccagttccaatttgccccaagaatactgagatgggagcaagctgcactttttttttytaaatgggaaataggttactatagcaccaaaaaaagcaaggctttatttaacaagtaaaatgtttctttttcattttaagaaatgagtagtcagaagaca

SEQ ID NO: 13214 - DNA, 201 bp, Homo sapiens
gtgaagtccacgctacgacatcagctcctggattggctcctggtaaagaacctcaaaccagaaacagcagaccacattgttttcttaggagtaacactaaycaagatcagggtttacgttcatataagaaaaaaagaagcactaataaaatgttttcaactttttcaaagcaagacaataactccaccaccgtacaactgt

SEQ ID NO: 13215 - DNA, 201 bp, Homo sapiens
cgggaggaagaaagacagggatggagggaagctcaggagtgaagggaagggaataaaaaacatttctctaatccaagcttctgtccccatgtcctgacctmgttaccccactgcctattaaacagctccacctagatgtcctgaaggcacctgaaggtaacagagctaaggtgaaatgcaacatccatatcctagccccca

SEQ ID NO: 13216 - DNA, 201 bp, Homo sapiens
cgccaccctgccaccccgccgcccgctcaccacgcgctgggcgcccgccgccacgacccgggcggacgcggacgtcgctgccagcttcaggagccgcaagsccatggctacccggtcagctcaggatcaaggacccaaggggacgcggtcgcgacggggccctctctcgcggccggcgcgctgccgtgacgtcacggccgg

SEQ ID NO: 13217 - DNA, 201 bp, Homo sapiens
ttttttttttttttttttttttttttgaggcagagtcccgctctgtcgcccaggctggagtgcggtggcgccatcgcgctcactgcaagctccgcctccckggttcacgccattctcctgcctcagcctcccgagtagctgggactacaggcgcccgccgccacacccggctaattttttgtatttttagtagagacgggg

SEQ ID NO: 13218 - DNA, 201 bp, Homo sapiens
tttttttttttttttttttgaggcagagtcccgctctgtcgcccaggctggagtgcggtggcgccatcgcgctcactgcaagctccgcctccctggttcaygccattctcctgcctcagcctcccgagtagctgggactacaggcgcccgccgccacacccggctaattttttgtatttttagtagagacggggtttcacc

SEQ ID NO: 13219 - DNA, 201 bp, Homo sapiens
ccatcgcgctcactgcaagctccgcctccctggttcacgccattctcctgcctcagcctcccgagtagctgggactacaggcgcccgccgccacacccggstaattttttgtatttttagtagagacggggtttcaccatgttagccaggatggtctcgatctcctgacctcgtgatccacccgcctcggcctcccaaagt

SEQ ID NO: 13220 - DNA, 201 bp, Homo sapiens
agatcctggagggcacctgaaatccatttaacaagctttagggttcatgtctgctgttttttgccttgtttcctttgcatttttttttttttttttgtgcyttccaatggatacagtacatttttttagaattccatcttgatttactgataatgtcttgggaaatatcattatgtatagttttcgtagtggttcctctag

SEQ ID NO: 13221 - DNA, 201 bp, Homo sapiens
agttaaaacaattttacagaagtaaagtagtcaaaaagttaaaagggtaaatggttacaggaaagtaaacagttcaaggtgcaggggctttaagactattrcaagatgatagacccggggctttgggcgttatcaatcggacaaattcctgggaactgcggatgtagcttgccacagtatcttaccagttaattgcattct

SEQ ID NO: 13222 - DNA, 201 bp, Homo sapiens
cagttgcttcaaagaaaatataatatttaggtctaaatccagcaaaacacacacagaatctgcatattaaaaagtacaaaacactgatttaaagaatgaakacctcaataattggaggggtttactatgttcatggattgaaagactcaacagagtaatgaagtcagttcttcccaaattgatttttaggtttaatggaat

SEQ ID NO: 13223 - DNA, 201 bp, Homo sapiens
gttcatggattgaaagactcaacagagtaatgaagtcagttcttcccaaattgatttttaggtttaatggaatttctagcaaaatctcagcgaggttctcytgtagacattgacaggcttactataaaatttatataaaaatataaaggctgtacaatagccacaataattttgaagcagaagaataaagtgggaggagtc

SEQ ID NO: 13224 - DNA, 201 bp, Homo sapiens
agacattgacaggcttactataaaatttatataaaaatataaaggctgtacaatagccacaataattttgaagcagaagaataaagtgggaggagtcactmttccagtgttaagatttactacataatcatataaatcaagactgtgttgtatggatggagggtgtgatattgatagatacgtagatcaatttaacagaac

SEQ ID NO: 13225 - DNA, 201 bp, Homo sapiens
accaatgctagcatctggttttggaagtcaggacagtgctttttgtggagaagggttaatgactgggagagggcgtgaaggcagcttctagttcttgatcygggagctggttccatgagcacagtccttttgtgaaaacatatgcagacgaaggcttgttacttgtgcacagttgtgtaggtttgttaaatttcacttagt

SEQ ID NO: 13226 - DNA, 201 bp, Homo sapiens
cacagagatgtaaataactcgggcatacagattaacgccgagtttctatgattaatttccacagtgcaggtggcagggcacaaagtggagagaacactgarggcattacgcatttactttcaaacttaattaagtaacttataaactgaaaatttgtattttaacacaactagataccaaactgagttccaagtaaggtct

SEQ ID NO: 13227 - DNA, 201 bp, Homo sapiens
catgtgagccgaccatccagggtgctggacaagagaagaggccaaagagcagcactgcatggctgaggcctgaggctgcagagggactgaggagtgaggcrcacaggccaccggaggagctgggtgtgaccacgcgtgacatacggggcctcgcgtcacggtcaccagatggccactagctctgcacgaagacaggaggag

SEQ ID NO: 13228 - DNA, 201 bp, Homo sapiens
acagcaccagccaggaaaatgtcatcttaaccatcactccacatcatccatttagtagtcctaccttgagctctgggtctctgttttaaaatttatctgayagggtttctaatagtcaagaagttactctaaataaagcccataaatcctcagtatctatgaatcttaaattctggttcaaattccaacatctctgaccac

SEQ ID NO: 13229 - DNA, 201 bp, Homo sapiens
taacagctgatgaacagagtgttctcctatcaagataatatgcctgatgaagaaccttccagaagaacatctctgctctggggctgtcatctgaggacttyatcagctttccacacagaaatacggggaaaagggagaattatttcaatgaaaaagaggctccttcactaaaacaaacaaaacacagcaacaacaaaaact

SEQ ID NO: 13230 - DNA, 201 bp, Homo sapiens
ttcaagtaaagagaaaacagggtcactgtgactttttaaaaaaataaacctggtgggagtgggatgaagaaataaagaggcagaggagcagagaccaagamccaggggattacacaccaaggggagcagcagtgttagagacaagggagagaagtcactgaaagtggcacactgacctgcagggtgtgactttggggagga

SEQ ID NO: 13231 - DNA, 201 bp, Homo sapiens
atctctagagtatgtataatacctaatgcaatgtaatacaataatatagtattataatatctaatacaatgtaaatgctatataaatagttgttatactgkatttttacatttttattatttttttattgctgtgttatttttattggcttttttcccaaatatttttgatccaaggttggttgaatccaaggatgcggaa

SEQ ID NO: 13232 - DNA, 201 bp, Homo sapiens
ggtttctcccaggctcttctcttgggtgcacaatttagacatgccctatatagtgcttcaaatgccagctgttcgcacagaaatcagtcaaggaaaaaaawatacacacacacacacacacacacacacacacagtcactcattctaatggaggaaactccttctactggtgaaacgctgtgtcctaactactttgagaga

SEQ ID NO: 13233 - DNA, 201 bp, Homo sapiens
ttatcaagattcacgtctgcctcgtggctttatggtgattccggcctatctctgggccctccgggacaaccctatgttgttggcatccacatctctgtctkcatggcacatgcacagtcttcataagtgtgatcccgtttcctcctggacacttctgtgctctctttacccctttgttttgacacatttcatatataaatg

SEQ ID NO: 13234 - DNA, 201 bp, Homo sapiens
aaaagaaacaaaaatagcaggcgagaaaacagaagattctgttgtcctagcaactatcttggacacgatcagcttcaaggagggaacgatcagcttcaagkagggaacgatcagcttcaaggagggagcacagtatcttaacagcatctggcttccttccattgaagagactgaactggtaaaatagaaaccaaatcacag

SEQ ID NO: 13235 - DNA, 201 bp, Homo sapiens
agataaagtgacttgtcccaagtcacacagccagctaagggctgacctgacccttcccgtctcctcagtctgacatgaggaccccacagtgtgcctacctygctcacccttcagtatccattccactaactagaaaactgattttgcaaatactattttaacaggggggcaggaattaacaaactaagtagaatgactagt

SEQ ID NO: 13236 - DNA, 200 bp, Homo sapiens
cagtacatatattgccatctacagttatcactctgctgcgttctgtcagtcttttgcttgctttatccccaagtaggaaatgccacattccatagcgcagttgcactgcacactgctatgaattcctctctgaaaaacacaaaatcacacagcagcacattgtgaccactctggttcctgtaggcattagtaactattag

SEQ ID NO: 13237 - DNA, 201 bp, Homo sapiens
tatagggaaattcagagaaccaggtccaagtatgaatactggtacacatattccggagaatcattttgcaaaaactcaatagctgtaaaatgcgttcatayactctgaccacttttataccttaagtaacctgaaattgaacaagaaggggtactacatgctctttactgtattatgaacatgaagaaactgaaataatcc

SEQ ID NO: 13238 - DNA, 201 bp, Homo sapiens
gaagccgcggtgccctcgggacgcccaagagctgcagagagccacaagacacggcctggtgtccctgtgaggtgactcctgaagggccacacctcagtgcrgggagaaggcctcctgccagcaaggagaccccagctggcacccagtggtgaaaccattctccactgggaattcgtaaccagagcttctctccacacaggt

SEQ ID NO: 13239 - DNA, 201 bp, Homo sapiens
tggaaatgcttctacatgtacagctgagctccgcaagaaatcacaaagggctaagaaggaagagtgagtggaaaagccagagtggtgagctgaagccgcgstgccctcgggacgcccaagagctgcagagagccacaagacacggcctggtgtccctgtgaggtgactcctgaagggccacacctcagtgcggggagaagg

SEQ ID NO: 13240 - DNA, 201 bp, Homo sapiens
ctaaaacacattttcaaagacatcaagaattttatctgacactatatctcttaaatctggaacggtgttgcacatagtggaagcaaaatgcctgttaaatyaataatggcactcaataaattaagtatcagaccaggggattcaggagctgtttggaagaaaaaatacctctaagtattgggttggtgctgctaacaccta

SEQ ID NO: 13241 - DNA, 201 bp, Homo sapiens
ttaatatataaaatacaaaataaaaaacttgttttttaacaaatggatgctcagttgcctcagtaccatttaggaaacaattttcctctacttcatttttrtaattatcctttaaggaactaactttgccaaactgaagatacttacacacaggtgcatacatgtttctggactcttgttttgttccattaagctctttat

SEQ ID NO: 13242 - DNA, 201 bp, Homo sapiens
ttcgttattcttcttcagatgttttaatgtttgtctggctgttattcataaagttccctgaaaactacaccaagatttactagactttcacaaaacacackaatttaaggaaaactgttatctttacatgtaaatctttcccattaactaatccaactttcaattttccatctctttaataaaaatggtagagtggatgac

SEQ ID NO: 13243 - DNA, 201 bp, Homo sapiens
atttgcaagaaccttacacatgaatcaaatgtaggaataactttcaacttttcaaccattttcttaccttttttgaatcttgagcttcccttgcagaataytgtaaaacctcacatttttcactgtaagaaaaaacaagatgaaattcagtgtaaacttttccaagctgaagttaaatgtacaaatgaatacataccgcta

SEQ ID NO: 13244 - DNA, 200 bp, Homo sapiens
ttacaaaactcgctacatgtcaggctggtcactcagtgctcctcttcttgtctctgaaatctcagaggtgacgattctttctcagaaaggccttccctacctgtcttgtgtacctctgtgtctcagctaacactgacactgggagctagcagtgttggagctgagtaaataagtatatgttgaacacgggaatggccaaa

SEQ ID NO: 13245 - DNA, 201 bp, Homo sapiens
aacttttaagatccaagtccatcacaaagctgcagtttgatcttggtctacaattcagcacttaaaataatgcatactgcatagagtacatctggtactcmttcttcaatgtgtgacaaatgacccctacatcaagtggctcccatcaatccatacggcttgagctgtcagataagatctactttaacaatgaacagagac

SEQ ID NO: 13246 - DNA, 201 bp, Homo sapiens
gggcctaagaaacgagtggcgaagaagttttagccctgtaaatcagtcgtgtgtttggctcacctcatctcagggagaaaggttttcttataggcattctyaatgtcctgtagataggcagaggtgatcttcatttcatgtggctaaacagaagcagaaaaatcaaactgggaaacatttagagttcattctctttgacct

SEQ ID NO: 13247 - DNA, 201 bp, Homo sapiens
ctctcttcttgtcacctgactctccctgcatctctccaacttgctcgccacctccatcgctcacccatctccccgcaaccacttctcccactttctacggytgtcacctctctcatcatctgaaatgcactatgcgaatttcagaaacttgaatatctaattatgagtagcaagttttaaaatttaaaactccttacagtc

SEQ ID NO: 13248 - DNA, 201 bp, Homo sapiens
acaggagagagaggaaggaagaaagaaatgaataggcctgcggtttcaacctacaaaatgatgaaaacattctaaaactggattatggcaagagtggcaayaacttggtaaatttacccaaaatcattcagtcgtacccttaaaatgggtgaattttatggagcataaattatacctcattaaagctgttcaaaataagaa

SEQ ID NO: 13249 - DNA, 201 bp, Homo sapiens
ccaggatgaaatccaccagctctgcagtggagaagtccgtgcaggccagcttgaggatgggggaaatgtcacagaagaagtggttcaagacgttggagccrcagaacgtgacgctggagataaaacagaccttgatcatggagatggtgaagccactcacaaaggagaagcccaccagctggaggcacagccccggggtca

SEQ ID NO: 13250 - DNA, 201 bp, Homo sapiens
ataagcatactattctttagtatgtacaattacatgttgtatatatacgaatatattacaatcttcttactccttataactttttctcctcacgatataayttatgtaccataaaattcaccttttaaaaatacacaatttggtggtttttagtatattgacagggttgtacaaccatcaccactatataattttagaaca

SEQ ID NO: 13251 - DNA, 201 bp, Homo sapiens; identical to SEQ ID NO: 1468

SEQ ID NO: 13252 - DNA, 201 bp, Homo sapiens; identical to SEQ ID NO: 1467

SEQ ID NO: 13253 - DNA, 201 bp, Homo sapiens
aagttgcccttcaccatggctatttgaaaaggagatgtacttggacgtttctgtaaatcttgagataaactgtttggagatttaaccacctctctgatggrggaccaactctatggaaattgtaaatacgttttatttataaacctggcactgtattcaataaacatttctgcagcctttcatctctaactgcgaactgtg

SEQ ID NO: 13254 - DNA, 201 bp, Homo sapiens
tgcagttttgtaacacttcatttgtaagatggtaccattttttcctggcttctgaatcataggatagtttgacccagggcattagccattgtaatggtagscttttaacaaataactgcctaatttaaaggattggaaagcatttgttacatggaaatgaagttggtggcgtacccagttgctgtatctttattttttcta

SEQ ID NO: 13255 - DNA, 201 bp, Homo sapiens
gttagctctccttgaggtctcgagttccctcggctggaggcacaggttcagtggagaccaaataatgcaggtgaattaccttcgtggccattactgcctcsaacgaagtgtgtttattaagaacagttcttatgtcattcttaaggtaggtagggttaatactctccagcaaatttagtagatactctttgccagaaaaga

SEQ ID NO: 13256 - DNA, 201 bp, Homo sapiens
ggtagaaagaaagatccgtttataatttgtaaaaacaaattttcacccagaatcaatatattggaacaccattcctactgttaaagttttcacttaagagyataaacttcatcagctttctattaggacttattttgtaattggcttcttaggcatccttctttaaaagagaaatccacgttagctctccttgaggtctcg

SEQ ID NO: 13257 - DNA, 201 bp, Homo sapiens
cttccagtccgcagagagatgccctccacgtttctgctttctctgcagcctctagattgccagatgcgactgtgcgcctcgctgggtgtgttttccacagmcccttcctcctcggcgtgcagggctgacatcaccgactgcgtttctggtttggcgggtggggagatggttccccgcagggttctggtacacctttgcccc

SEQ ID NO: 13258 - DNA, 201 bp, Homo sapiens
tcttgaggggggaggtgaaattaaatagccatagaaagtgctttttaacaaacttactgtgtttaaagaggaggaggaacccccagatgaagtaggtgacragcactcttagaagttaccataaaagtgagtacagtgtgagctgtagatgtgtttgctgcagaggagcatgtgaggtttggaggcggatgtgtggtgact

SEQ ID NO: 13259 - DNA, 201 bp, Homo sapiens
agccttttaacaaataactgcctaatttaaaggattggaaagcatttgttacatggaaatgaagttggtggcgtacccagttgctgtatctttattttttstacttaattatttctcataaaatggatataaaagcctgttaatccaacccaatgccattatgtaacgccagtttggagatttcgagggcctggagcagtg

SEQ ID NO: 13260 - DNA, 201 bp, Homo sapiens
tgaggctcaagtcatgggtccagtctcattaatggccagttattttgctctgttcttattctatatcccggaccccactttctgtgttgcatatttatgaygttggtcacgagggtggcttgaccagagagggaacagaggaaggcaaatccatcaccacagctactagcaaaacaagcacaaatcctgtgaatggaggat

SEQ ID NO: 13261 - DNA, 201 bp, Homo sapiens
tttattctatttactttcattaaatgaccgtgctacaggtttcaaaggattttaagattgatttttgaaagatcacaatattaaaagtataactggaaaayctatgttgaaatcaaccaaacatgtcgtggactgaatgataaccttttctttcttcatataggctgatcagctgaccgaagaacagattgctggtaagtt

SEQ ID NO: 13262 - DNA, 201 bp, Homo sapiens
gtgtcgtggacgccgtgccgttactcgtagtcaggcggcggcgcaggcggcggcggcggcatagcgcacagcgcgccttagcagcagcagcagcagcagcrgcatcggaggtacccccgccgtcgcagcccccgcgctggtgcagccaccctcgctccctctgctcttcctcccttcgctcgcaccatggtaggtcgggag

SEQ ID NO: 13263 - DNA, 201 bp, Homo sapiens
gcactgatgatgagtttgaaattatgtgaaattgccctgtgaagtgtttgaacgttttagacctgcagatgattgaacctagtaagatagtctgccccttygtcctagtacatgtttaccgttccgtacagtggttctgaaatgattactgcagagcagcgttaatggagtgcttactttacatgagctttttgtttttta

SEQ ID NO: 13264 - DNA, 201 bp, Homo sapiens
atgtcgtggactgaatgataaccttttctttcttcatataggctgatcagctgaccgaagaacagattgctggtaagttgacaactccaaggagtccccaraaggccagaactaggcactgactcagttttggtgactcctctgttcctccccgctacagtctgggcagttttctaagaatttatttaaataagaacagta

SEQ ID NO: 13265 - DNA, 201 bp, Homo sapiens
aacttgaagtgagcagatgttgtcacttccttgtaatcctttgttaaaatagcataaggagttttctttattctatttactttcattaaatgaccgtgctrcaggtttcaaaggattttaagattgatttttgaaagatcacaatattaaaagtataactggaaaatctatgttgaaatcaaccaaacatgtcgtggactg

SEQ ID NO: 13266 - DNA, 201 bp, Homo sapiens
cggggcgcagactcgcgctccggcagtggtgctgggagtgtcgtggacgccgtgccgttactcgtagtcaggcggcggcgcaggcggcggcggcggcatakcgcacagcgcgccttagcagcagcagcagcagcagcagcatcggaggtacccccgccgtcgcagcccccgcgctggtgcagccaccctcgctccctctgc

SEQ ID NO: 13267 - DNA, 201 bp, Homo sapiens
cggctccgccgcggcggagggatacggcgcaccatatatatatcgcggggcgcagactcgcgctccggcagtggtgctgggagtgtcgtggacgccgtgcygttactcgtagtcaggcggcggcgcaggcggcggcggcggcatagcgcacagcgcgccttagcagcagcagcagcagcagcagcatcggaggtacccccg

SEQ ID NO: 13268 - DNA, 201 bp, Homo sapiens
gcagtgaggccaagatcgtgccactgtgctccagcctgggctacacagcaagactccgtctccaaaaaaaaaaaaaaaaaatcatgggacactaaacagaygccttatatgctaaaatggataatatttttctcatggtaagttgtcatggcctaacacttgcttattatgttctgatggtaacatattttcaaatttaaa

SEQ ID NO: 13269 - DNA, 201 bp, Homo sapiens
caaaactttttgtaataatcctgaatagaatttaatgaaatgtaaatccaaacacaaacagcaagaatctgttctggcaattggagatgattagtgaagcrgagaatcctgaatggtggatattcatctaagtactattggaccacggggtggagaaggagggagtcgaggatggtgaagaggtattactgactctcaaac

SEQ ID NO: 13270 - DNA, 201 bp, Homo sapiens
attattgggtaagaagtatctctttataaaccaaattttcatcttaatctttgccacttctgcctcctaccccaaattaaaataaaaataaattctactamattgcaggagatagttataatgtaatgcttaagtgcttgggctctcagctagatttttgggttccacttaaattaggcaagtcactgactcgttcagtgc

SEQ ID NO: 13271 - DNA, 201 bp, Homo sapiens
cagagtcttgtactgttgcccaggctggagtgcagtggtgcgatctctgctgactgcaacatctgcctcccaggttcaagcgattctcctgccttagtctyctgaatagctgggattacaggtgcctgccaccacgcccagcttattttttgtatttttagtagagacagggtttcactatgttggccaggctggtcttga

SEQ ID NO: 13272 - DNA, 201 bp, Homo sapiens
aatatattatctaaattagagcccctgagcaaggactcaagctctattttatgccccatccctgactcacagtaagatcctgggcaagtcacttgaccttyttatatttcagagtgtcaaactgtgaaaagcatgtccataaaactgtgcaagcatgacctcattataaacccgatgaacttgaaagcaaagatgtgcttt

SEQ ID NO: 13273 - DNA, 201 bp, Homo sapiens
ggcggcatagcgcacagcgcgccttagcagcagcagcagcagcagcagcatcggaggtacccccgccgtcgcagcccccgcgctggtgcagccaccctcgytccctctgctcttcctcccttcgctcgcaccatggtaggtcgggagtggcaaatgccggcgtagcagctgcccgagatttcttcccagatttctagttgt

SEQ ID NO: 13274 - DNA, 201 bp, Homo sapiens
gccattactgcctcgaacgaagtgtgtttattaagaacagttcttatgtcattcttaaggtaggtagggttaatactctccagcaaatttagtagatactstttgccagaaaagagaggagtatatatagtttgataattattgtgtagttttctgtgtacttaatttttgcagttttgtaacacttcatttgtaagatgg

SEQ ID NO: 13275 - DNA, 201 bp, Homo sapiens
gccagtactttatagatgaggtgaaaggaagtaaaactaaggatgcccacatgttaaactctggagaatttgaccatgtttcacaatgtgcaaagtttgcrtatgattaattgtactgagcctgctactcagcggtttagtttacaattcttatgccatgggtctttcagtaatctgccacgaaagcttgtgctcgctatc

SEQ ID NO: 13276 - DNA, 201 bp, Homo sapiens
tagtgttttggaaagaaaaggttgtccatagttctctagtttgctaagatgatcagctacccaggaacgtggagtaacttcctcttgtttgtgggagcccygggaatctgtgcctggggaggggagaagtctgttaggctcttggattgtgtggaagaaggagaagttgtgccaggctacagaatcctgtgtttgcactga

SEQ ID NO: 13277 - DNA, 201 bp, Homo sapiens
aggcaaatccatcaccacagctactagcaaaacaagcacaaatcctgtgaatggaggataagatatgttttctcctataaaaagcaaagtgtttcaaaataaaaaaaaaaaacaagaatgaggcactcaaagctagtgaatggtgctgtttggaaatactgcacttcagactactgagtatactggtgaccatcacaagct

SEQ ID NO: 13278 - DNA, 201 bp, Homo sapiens
tagtctggctatgagtcatttgaaatcatgggacactagccgggtgcggtggctcacgcctgtaatcccagcactttgggaggcggaggcaggcggatcaygaggtcaggagattgagaccatcctggctaacacggtgaaaccccatctctactgaaaatacaaaaaaattagccaggcatggtggcgggtgcctgttgt

SEQ ID NO: 13279 - DNA, 201 bp, Homo sapiens
gattgagaccatcctggctaacacggtgaaaccccatctctactgaaaatacaaaaaaattagccaggcatggtggcgggtgcctgttgtcccagctactyaggaggctgaggcaggagaatggcgtgaacccggcaggcggagcttgcagtgaggccaagatcgtgccactgtgctccagcctgggctacacagcaagac

SEQ ID NO: 13280 - DNA, 201 bp, Homo sapiens
ctactgaaaatacaaaaaaattagccaggcatggtggcgggtgcctgttgtcccagctactcaggaggctgaggcaggagaatggcgtgaacccggcaggyggagcttgcagtgaggccaagatcgtgccactgtgctccagcctgggctacacagcaagactccgtctccaaaaaaaaaaaaaaaaaatcatgggacact

SEQ ID NO: 13281 - DNA, 201 bp, Homo sapiens
aggcaggagaatggcgtgaacccggcaggcggagcttgcagtgaggccaagatcgtgccactgtgctccagcctgggctacacagcaagactccgtctccaaaaaaaaaaaaaaaaaatcatgggacactaaacagacgccttatatgctaaaatggataatatttttctcatggtaagttgtcatggcctaacacttgct

SEQ ID NO: 13282 - DNA, 201 bp, Homo sapiens
tatcttggctcactgcaacctccgatgccctggttcaagggattctcctgcctcagcctactgaaagtagctgagattacaggcacgcgccaccacacccygctaatttttgtatttttagtagagacaaggtttcactatgttggccaggatggtctcgatctcctgacctcgtgatccgcctgcttcggcctccccaag

SEQ ID NO: 13283 - DNA, 201 bp, Homo sapiens
attggatttagtcccttgaacctgggaggcaggggttgtagtgagctgagattgcaccactgcactccaatctcggtgacagagcgagactccattgtttaaaaaaaaaaaaagattggatttaggactaatttaagcatgttccagcttagccgccttgaaacctttgggaatattgtggtgtgtggcactgtttattgg

SEQ ID NO: 13284 - DNA, 201 bp, Homo sapiens
tgatgggccttgcgtccatcctgcttagtgtctagaatgttttctgcatgggatcactattgttttcttcctgcttggtgcgacctagagctcaaatctatttttttttttttttttggagacggagtctcgccctgtcgcccaggctggagtggcactggcgcgatctcggctcactgcaacctctgcctcttgggttcc

SEQ ID NO: 13285 - DNA, 201 bp, Homo sapiens; identical to SEQ ID NO: 1457

SEQ ID NO: 13286 - DNA, 201 bp, Homo sapiens; identical to SEQ ID NO: 1459

SEQ ID NO: 13287 - DNA, 201 bp, Homo sapiens; identical to SEQ ID NO: 1461

SEQ ID NO: 13288 - DNA, 201 bp, Homo sapiens; identical to SEQ ID NO: 1462

SEQ ID NO: 13289 - DNA, 201 bp, Homo sapiens; identical to SEQ ID NO: 1463

SEQ ID NO: 13290 - DNA, 201 bp, Homo sapiens; identical to SEQ ID NO: 1464

SEQ ID NO: 13291 - DNA, 201 bp, Homo sapiens
caataagatgggaattttagatgacaaccaagatgataccttggttcatgtcaagagcgggacagctgaggaaagtggggtgggatgcaagtacaatttargaccttggcattgaagccttccccttagtcaacactggcccagaccctggttcttagatgtagcaggagaggctgcctgcttctgccccctttgcttcca

SEQ ID NO: 13292 - DNA, 201 bp, Homo sapiens
actctgattaaatcaagtggcagttttcctcatgagaattatgttctttgtgtcaggaaccttaggaatgagtgtgaattgacacattcagattgtggggttttttttttctcttttgaggtggggtctcattctcactcaggctggagtgcagtggcacaatcacagctcactgcagcctccacctcccaggttcaaatg

SEQ ID NO: 13293 - DNA, 201 bp, Homo sapiens
ctgatctccactcactgcaagctccgcctcccaggttcacaccattctcctgcctcagcctcccgagtagctgggactacaggcgctcaccaccacacccygctaattttttgtatttttagtagagacggggtttcaccgtgttagccaggatggtctcaatctcctgaccttgtgatccacccgcctcagcctccccaa

SEQ ID NO: 13294 - DNA, 201 bp, Homo sapiens; identical to SEQ ID NO: 1469

SEQ ID NO: 13295 - DNA, 201 bp, Homo sapiens
gacctgagtgatttccctaactcagggatggcagtcgggggcgctttcttccctcggagtggaaagattcagcctgcggagtggtgtatgctatttttctyttgaactgtacagcccttcatgacccttccatgggcttgaatccagatgtgcagtttcctttgtataattaaatactatcctgggcactgatgatgagtt

SEQ ID NO: 13296 - DNA, 201 bp, Homo sapiens
gagattacaggcacgcgccaccacacccagctaatttttgtatttttagtagagacaaggtttcactatgttggccaggatggtctcgatctcctgacctygtgatccgcctgcttcggcctccccaagtgctgggattacaggtgtgagccaccgcgcccggccaagatgcagttttaataaggagtttggccatttagg

SEQ ID NO: 13297 - DNA, 201 bp, Homo sapiens
cttaggaaagaagcagttttagtattattattattattggatggagtctcgctctgtcaccaggctggaatgcgatggcgctatcttggctcactgcaacstccgatgccctggttcaagggattctcctgcctcagcctactgaaagtagctgagattacaggcacgcgccaccacacccagctaatttttgtattttta

SEQ ID NO: 13298 - DNA, 201 bp, Homo sapiens; identical to SEQ ID NO: 1466

SEQ ID NO: 13299 - DNA, 201 bp, Homo sapiens
atatatgacagaggttatatatgtatatgttataatcatataacctcagacacagggtttcacagctagaaggaatttctacatcaagtacaaaactcttsttacatctgtgtcctttctgtcagattcagagggttagagtgatttggttagtgacggaaatgatacttaaacatgagattcctggcttgaggctgcatc

SEQ ID NO: 13300 - DNA, 201 bp, Homo sapiens
cgtcttgtctaaggttatcccaagaagtcctgtggcatttgcaatgtgcctgtacatttttccttttttaaaaaacatattcctgcagactttgttgaaascagaaacaaacacaagcaagcaaagccctttctagcacagcatgttaatcacacactttgccatattctgtgaaacagtaagcaaatgataacctccaac

SEQ ID NO: 13301 - DNA, 201 bp, Homo sapiens
tttcacagctagaaggaatttctacatcaagtacaaaactcttgttacatctgtgtcctttctgtcagattcagagggttagagtgatttggttagtgacrgaaatgatacttaaacatgagattcctggcttgaggctgcatcgtttttacttttcttccatttacttttatcttatttaaataacttcctatagaacaa

SEQ ID NO: 13302 - DNA, 201 bp, Homo sapiens
agctagaaggaatttctacatcaagtacaaaactcttgttacatctgtgtcctttctgtcagattcagagggttagagtgatttggttagtgacggaaatkatacttaaacatgagattcctggcttgaggctgcatcgtttttacttttcttccatttacttttatcttatttaaataacttcctatagaacaatttcct

SEQ ID NO: 13303 - DNA, 201 bp, Homo sapiens
aaaatagtaggggagaaatattcaggcatcctaaaaaatattcagtggaaacgtaaaaacattaaagactgattaaacatcgcagcatgacacagatttarcaactgagcataaataatttgactcggatactgctccaaaatccgaagaggaccaatttcttccaggaggacaactacctcgtcctctgcagacccctct

SEQ ID NO: 13304 - DNA, 201 bp, Homo sapiens
gtcttcgcccccgcccagggtgggcgtctcctgaggactccccgccacacctgacccgagaccgcgcgcccagcctagaacgcttccccgacccagcgtakggccgccgcgactggcgcgcagggggcggcgggaggcctggcgaacccgggggcgggaccaggcgggcaaggcccggctgccgcagcgccgctctgcgcg

SEQ ID NO: 13305 - DNA, 201 bp, Homo sapiens
taattggggcggggggggggggcggcgggggaggagggaactggcgcgcggcttggtttccattagagacgcaaagtttctgctccgggaggaggcggcgrcgccgcgggctcgtcgcctgggggagcagaagcgggtgggaggtgcgggtggccttggcctcagccctggtgcgcgggggccgggggtggtgaccctcct

SEQ ID NO: 13306 - DNA, 201 bp, Homo sapiens
attagagacgcaaagtttctgctccgggaggaggcggcggcgccgcgggctcgtcgcctgggggagcagaagcgggtgggaggtgcgggtggccttggcckcagccctggtgcgcgggggccgggggtggtgaccctcctggccgaggaggggcggcgtccagacgcccgctcgggggccgccttcccccccacgcctgcc

SEQ ID NO: 13307 - DNA, 201 bp, Homo sapiens
atggatataaaagcctgttaatccaacccaatgccattatgtaacgccagtttggagatttcgagggcctggagcagtgcgcaaggtgcgctgaaagcctkcccctggatgagatccttatcctggctgtgatggcagtggcagtgggctgggtcccttgttgagtggaaagggggactgcggtgtccatggtgcagtagg

SEQ ID NO: 13308 - DNA, 201 bp, Homo sapiens
agaccagtttgggcaacatagcgagaccccatctctaaaaatagtaataataataataaattaattaattaaatttaaaaaaagaatctccaggccaggcrtggtggctcactcctgtaatcccagcactttgggagtccaaggcaagaagattatttgagcccgggagtttgagattacagtcagctatgatcatgccat

SEQ ID NO: 13309 - DNA, 201 bp, Homo sapiens
gagtcttgctctgtcgctcaggctggagtgcagtggcctgatctccactcactgcaagctccgcctcccaggttcacaccattctcctgcctcagcctccygagtagctgggactacaggcgctcaccaccacaccctgctaattttttgtatttttagtagagacggggtttcaccgtgttagccaggatggtctcaatc

SEQ ID NO: 13310 - DNA, 201 bp, Homo sapiens
attattaatcacaaattaataaacaatataactatgtggttataatatataattgtaaatacaaatatataattatataaacaacaaattaatgatattartgtaataaagttactaacaaatatcaattaagaagatattaattaaatagataattaggattgactacctgttagatcatagggtaaatctcaacaacta

SEQ ID NO: 13311 - DNA, 201 bp, Homo sapiens
tccattttaagctgctttaactgtgagcacattcttactaggctggaatctgcttccttttaaccccacccattggtgctattgcagcttgtggagctaaytctagacatctaatcctgtttccacaaggcagaccttggtcttcctcactgtcatggacccctcccgacttgtcaggcttaacattttgctcctttttta

SEQ ID NO: 13312 - DNA, 201 bp, Homo sapiens
tagtagagatggggttttgccatgttagccaggctggtcttgaactcttacctcaggtgatccacctgtctcggtctcccaaagtgctgggattacaggcrcgagccactgcacccagcttcttttttactttttctactgaacatttctccatcgctttacattcttgaatataatttttaagatctggctgtattaata

SEQ ID NO: 13313 - DNA, 201 bp, Homo sapiens
gtgtggtggcaggcacctgtagtcccagctactcaggaggctgaggcatgagaatcgcttgaacctgggcagtggaggttgcagtgatctgagattgtgcygctgctctccagcctgggcaacagagcaagactccatctaaaaaaaaaaatttatagccttaaaatgcttataatggaaaagtagaaaggctaaaaataa

SEQ ID NO: 13314 - DNA, 201 bp, Homo sapiens
cgaggcaggtggatcacttgaagtcaggagttcgagaccagcctggccaacatggtgaaaccccatctctactaaaaatacaaaaattagccaggcgtggwggcaggcacctgtacctgtaatcccagctactcagggggctgaggcaggagaatcgcttgaacccacaaggcgaaggttgcagtgagctgagattgcacc

SEQ ID NO: 13315 - DNA, 201 bp, Homo sapiens
ctaaaaatacaaaaattagccaggcgtggaggcaggcacctgtacctgtaatcccagctactcagggggctgaggcaggagaatcgcttgaacccacaagrcgaaggttgcagtgagctgagattgcaccactgcactccagcctgggcaacagagtgaggctctgtctcaaaaaaaaaagaaaaaatgtatttcactaac

SEQ ID NO: 13316 - DNA, 201 bp, Homo sapiens
gcagtggtgcgatctctgctgactgcaacatctgcctcccaggttcaagcgattctcctgccttagtctcctgaatagctgggattacaggtgcctgccaycacgcccagcttattttttgtatttttagtagagacagggtttcactatgttggccaggctggtcttgaactcctgacctcatgatccacatgcctcagc

SEQ ID NO: 13317 - DNA, 201 bp, Homo sapiens
ttttaagctgctttaactgtgagcacattcttactaggctggaatctgcttccttttaaccccacccattggtgctattgcagcttgtggagctaactctrgacatctaatcctgtttccacaaggcagaccttggtcttcctcactgtcatggacccctcccgacttgtcaggcttaacattttgctccttttttatttt

SEQ ID NO: 13318 - DNA, 201 bp, Homo sapiens
caatatcatatcttagttttattttcagttttacaaaggctaaaaggaaaatccagagtttcctctagcaatataattatttgaacattttgttacaacawgatctttagatcctggctgtatgtaagcatgtttgcttttaaactgatttttcattttgagtctttgtatacccttcaagttgtgattttttttaagtta

SEQ ID NO: 13319 - DNA, 201 bp, Homo sapiens
atttttatttttatttttttgagatggagtcttgctctgtcgctcaggctggagtgcagtggcctgatctccactcactgcaagctccgcctcccaggttyacaccattctcctgcctcagcctcccgagtagctgggactacaggcgctcaccaccacaccctgctaattttttgtatttttagtagagacggggtttca

SEQ ID NO: 13320 - DNA, 201 bp, Homo sapiens
cgggaccaggcgggcaaggcccggctgccgcagcgccgctctgcgcgaggcggctccgccgcggcggagggatacggcgcaccatatatatatcgcggggygcagactcgcgctccggcagtggtgctgggagtgtcgtggacgccgtgccgttactcgtagtcaggcggcggcgcaggcggcggcggcggcatagcgcac

SEQ ID NO: 13321 - DNA, 201 bp, Homo sapiens
gagggatacggcgcaccatatatatatcgcggggcgcagactcgcgctccggcagtggtgctgggagtgtcgtggacgccgtgccgttactcgtagtcagkcggcggcgcaggcggcggcggcggcatagcgcacagcgcgccttagcagcagcagcagcagcagcagcatcggaggtacccccgccgtcgcagcccccgc

SEQ ID NO: 13322 - DNA, 201 bp, Homo sapiens
tttattggttccccttggagctggacttggtcgtaggccgtccacgggcaggggctccggccgcaactgcagcgggggtttctgcatccaatccccctgcyccccgcccagccccgcacccactgcatccactagcgccgcacccgggctgcctgcagcgcagcgtttcggcctgggagccgggcggggccgggcactaga

SEQ ID NO: 13323 - DNA, 201 bp, Homo sapiens
tgcagaacctaacggaaagggaagctgtaaggtgcagggccagagggaaccagcagtaaccctgatagcggtctgtcatctgttcctctcgactctacagmagcggacaacagaactttgattgctgatttccatcagtaagcaggctttgaagcacacttccccacccctaaaaaaaaaccacgtattttggtaaatcct

SEQ ID NO: 13324 - DNA, 201 bp, Homo sapiens
cagaacctaacggaaagggaagctgtaaggtgcagggccagagggaaccagcagtaaccctgatagcggtctgtcatctgttcctctcgactctacagcarcggacaacagaactttgattgctgatttccatcagtaagcaggctttgaagcacacttccccacccctaaaaaaaaaccacgtattttggtaaatcctat

SEQ ID NO: 13325 - DNA, 201 bp, Homo sapiens; identical to SEQ ID NO: 1465

SEQ ID NO: 13326 - DNA, 201 bp, Homo sapiens
tttattttattttaattaattaattaattaattaattagagacagagtctcactctgtcgcccaggttggagtgcagtggcgcaatcgccactcactgcarcctctgcctcctgggttcaagtgattctcctgcctcagcctcctgagtagctgggattacaagcgcccgccaccacgcctggctaattttttgtattttt

SEQ ID NO: 13327 - DNA, 201 bp, Homo sapiens
agagtctcactctgtcgcccaggttggagtgcagtggcgcaatcgccactcactgcaacctctgcctcctgggttcaagtgattctcctgcctcagcctcmtgagtagctgggattacaagcgcccgccaccacgcctggctaattttttgtatttttagtagagatggggtttcactatgttggccaggctggtcttgaa

SEQ ID NO: 13328 - DNA, 201 bp, Homo sapiens
attatgtgaaattgccctgtgaagtgtttgaacgttttagacctgcagatgattgaacctagtaagatagtctgcccctttgtcctagtacatgtttaccrttccgtacagtggttctgaaatgattactgcagagcagcgttaatggagtgcttactttacatgagctttttgttttttaattcgaggtaatggcaccat

SEQ ID NO: 13329 - DNA, 201 bp, Homo sapiens
agacctgcagatgattgaacctagtaagatagtctgcccctttgtcctagtacatgtttaccgttccgtacagtggttctgaaatgattactgcagagcascgttaatggagtgcttactttacatgagctttttgttttttaattcgaggtaatggcaccattgacttccccgaatttttgactatgatggctagaaaaa

SEQ ID NO: 13330 - DNA, 201 bp, Homo sapiens
ccttcgcctcctgggttcaagcaattctcctgcctcagcctcctgagtagctgggactacaggcgcacaccaccacgtctggctaatttttgtatttttartagagacggagtttcactatgttggcgaggctggttttgaactcctgacctcaggtcatctgtccgccttggcctcccaaagtgctgggattataggcat

SEQ ID NO: 13331 - DNA, 201 bp, Homo sapiens; identical to SEQ ID NO: 1458

SEQ ID NO: 13332 - DNA, 201 bp, Homo sapiens; identical to SEQ ID NO: 1460

SEQ ID NO: 13333 - DNA, 201 bp, Homo sapiens; identical to SEQ ID NO: 1470

SEQ ID NO: 13334 - DNA, 100 bp, Homo sapiens
ccataagaaactgctgagtacttggcaaaccctttcatagttttgttctmcatctgtttggggtaggtgttgagcgaggcaaatggatctcgatatttca

SEQ ID NO: 13335 - DNA, 201 bp, Homo sapiens; identical to SEQ ID NO: 1494

SEQ ID NO: 13336 - DNA, 201 bp, Homo sapiens
ctccctcctgtgagcagctggtaggagtggccactgggtggcgtgtgggcaccagggtttccttgctcccagttgtccagagctccttaattcatccatcyttctggcactgtcgccttagaaggcggaagtttctaagtcaggatgatggcaaaggtcagtgagaaatgctgacttcaagctgtaaatttgtgtgtgagt

SEQ ID NO: 13337 - DNA, 201 bp, Homo sapiens
aggcatgcaccaccatgcctggctaattttgtattttcagtagagacgtggtttcaccattttggtcaggctggtctcaaactcctgacctcaggagatcygcccacctcagcctcccataatgctgggattacagacgtgagccactgcgcccaaccaggaactttatttttattattttgagatggagtctcgctctgt

SEQ ID NO: 13338 - DNA, 201 bp, Homo sapiens
ggagaattacctaaaaggtacagaaaaacctttcactgtttccttttaagaacagatcaatacttcaagaaaaccttgttttaacagagaggaccaaattctgatttttcatcagtgtacttttgatattaaggctcatcaaaaaaaaaaaaacacaaaaactataagttagcccattcgaccacacttgaagttcttttc

SEQ ID NO: 13339 - DNA, 201 bp, Homo sapiens
ccattcctttaccggactgtacacctcgcctcctggggcctgaggcgggaacccgggtcgcgctgctccgaggcctcggcggaccgcgaaaggatggctcrccacccggccagggccagcccctgcaacaagctcagccccgcccgctcccgcgcccaggagcggccggcggggcggggtggctgggccggcctcgggggc

SEQ ID NO: 13340 - DNA, 201 bp, Homo sapiens
agggctgtccaattactgaatcatacataaaagccaagtaagattttaaaatttgttataattttggtttttaacaacttctgttgtaaataataaaagcmctaaatccctactgaaaataaagggcctaaagactgaatgagagatgcaattttttttggctaacctattggcaaagaaatgatgatgatgatgatgatg

SEQ ID NO: 13341 - DNA, 201 bp, Homo sapiens
cctgaggtctgagagagggagacttccaggaccccaccccatttagagcgagcaccttccctaccctgtcttctagccttaccaggtgtcccagagcaaargtagtacagaagtcatatttgtgtcttagttagaatgttttcctggtggttttggaactttgcacaacctcctccccactgccccccgccccccgccccc

SEQ ID NO: 13342 - DNA, 201 bp, Homo sapiens; identical to SEQ ID NO: 1516

SEQ ID NO: 13343 - DNA, 201 bp, Homo sapiens
agcaaaggtagtacagaagtcatatttgtgtcttagttagaatgttttcctggtggttttggaactttgcacaacctcctccccactgccccccgcccccygccccccgccttcttctgcatagcttcctaccatctgcaggacggggaacttggggaattgcttttcactctccagcttccgcttgttcctccccacagt

SEQ ID NO: 13344 - DNA, 201 bp, Homo sapiens
cgcttacctgcagagactctctgggctcaccagggaggctgcccagaccacagttgcaccaaccactgctaacaagatagctcccactgtttggaaattgkcagatcggtaaggctacgcctggttctcctcacttcttctccttcctctgatcacagaccaccacaccttcacacccacgccctcttgctcattcttctt

SEQ ID NO: 13345 - DNA, 201 bp, Homo sapiens
aaccctgttccgcagctcagagacctcaaaggcctcagccccccgcacccagtgtcgcctgcaccctcattacgtccccaccacagccctggccctcttcyccaccctcttctgttcgcaggcagactcattggcaggctacaggcctggcaagcactcgtatatgcctgaccctccctccctttggttttctaattgcag

SEQ ID NO: 13346 - DNA, 201 bp, Homo sapiens
cacggaagagcagctcacatttggaaggggctaaaatttttacctagtttgaatctgctctgcaatgtccccatcaagttcttaaccatcccgggttccartggttacagagttctgccctggggagggaggaattgcttagcaaatgatgttgagaatagtgattatttgggggaaaattcaggtaagatctcaccttca

SEQ ID NO: 13347 - DNA, 201 bp, Homo sapiens
ctggaaaccctggactctgctgctcagtactgctgagtcagatgtggctctgggcgcttcgggtttggccgctggctcagcctcccttggccctggggccyggatctgagcccaccctcctcagtgtgggtctgcaggaagctggggctgccctcgggtgatttgtgcctctccttgggaacttcctgccagcctgatccc

SEQ ID NO: 13348 - DNA, 201 bp, Homo sapiens
taatagagacctttcctccaaggctgagagctgtttggtcctcacagtgcagaggcctggggttgacaacctagagacttagaggggaaaaatccagaackgacccacgtacagtccctcctcctgacccatgagggagagcacccagcatgctttcccggcatgcctcagacaccccaccaccctagtccagtactctcc

SEQ ID NO: 13349 - DNA, 201 bp, Homo sapiens
ctgacccatgagggagagcacccagcatgctttcccggcatgcctcagacaccccaccaccctagtccagtactctccaaaggagtcaccccaggaagatyggcttgtgtgtcactcgcatctctcagctgtgctcaaacctgctattttctttgtccccagtggggctgtttgcagccggtatgggggaaaagaatgaga

SEQ ID NO: 13350 - DNA, 201 bp, Homo sapiens
tgtttgggttttgcccgcacatcccctggggtctgtagagtattctggcccttgccttgcttgggtagcttcttcctgaatagtagtatcctagcagctaycatttcttcagccctgccggtgcctgcagtgttctttgtatattagctcctcattctgtttctcagagaagattccacagcatggcttctagtatgatct

SEQ ID NO: 13351 - DNA, 201 bp, Homo sapiens
agggtcttccagctagtgaggggctgggcagggagccacacccactcgcatccagcccatgcccattaccaccaagtgcatggtgctcacaggcccgaacscctaagggtgccagtggacactgctggctccccctggctagctgccagccctgcaggtgcccggtcagtcaggaggccctctgcatgtcctgccggtgcc

SEQ ID NO: 13352 - DNA, 201 bp, Homo sapiens
ccagtatccttctcctctcaaatgtttgtctttgctttctttgctgtgattttctcagggtcctcatcccctcggccagcctctttgtggttttatctgaycagcctgctgctgtgtccctctttctcctgccctccgccccttgtgctgtgcacgtgcacacacgcacacacacacacatacacacatatgtcctcctcc

SEQ ID NO: 13353 - DNA, 201 bp, Homo sapiens
agtcacactccgccgttcctgtctgtgggcaccgggctgtcccgtgcctttccatgccctgcctggagccagagggccactgggggaattcttgggcccarttgccttaccaggtgaggtttgacatcaggctggtgtcagagaggctttccagagcatgtgcagtgattagaagggttacagcgaggcctgggtgccgtc

SEQ ID NO: 13354 - DNA, 201 bp, Homo sapiens
agccccctcaggagaagctgcagtctgctgtctgcggggccagcgcctccaccgtcaggagcctgggcctgaaacgctaaccctgttccgcagctcagagwcctcaaaggcctcagccccccgcacccagtgtcgcctgcaccctcattacgtccccaccacagccctggccctcttccccaccctcttctgttcgcaggc

SEQ ID NO: 13355 - DNA, 201 bp, Homo sapiens
aatagtttgtattctttgccatttctgatgctctgaaacagatattcaaacaagcaagtctttatgtatttatctggagtgtctttctcaagcactcagcrtgttcagtagacatttgtctccttaatttctaggcccatgggaaagataactacaacactgtttaacaacagagacatttgaaggtacaaaactttactg

SEQ ID NO: 13356 - DNA, 201 bp, Homo sapiens
ctcctttttagagcatactgtgagttcctgggaccctagaaaatagtgccgcaatagcaacaggtcaccagctacaggctgcctcagccttttcccaaggyctatcctcctgaggagcaaggggtggtcaaggggaggctatttgcaggtgtggacaaaactctgatgtgcagatgtcgttgttataggtgtgggcaaaag

SEQ ID NO: 13357 - DNA, 201 bp, Homo sapiens
atgtatcatctctttacccccactggaatgtaagttccacgtccctagagtctatattttgtttactgccttatccttatacctaaacaagtgcctggcaygacaccactcagtaaaacttgaataaatgaataacaaatctaggctcaaagctcttacaggtgaaaggggctaacctggcagtcacaaaggaaaaatatc

SEQ ID NO: 13358 - DNA, 201 bp, Homo sapiens
atgtgggggatctgggctgctgggaaccccgaatgttggaatcgccctgacaaccttatgagggtggtcagatatgggtcctgaggaaactgattccacgrcaactgcccgccaacccagcacaccccacagtgaagaggggcttctgatccatgagtagggcccctcaaatgatgttcccctttagatggtcatggtcat

SEQ ID NO: 13359 - DNA, 201 bp, Homo sapiens
cgcccggttcgtcccccgccaggttactgcctccttccctgcgagaggtctcctttgttccttcctccgcatggtccgctgacaccttaccgtttcctggkccagccttgtggcagtcctcttcctctcgtccagggacccatgtcatcttcctgccaggttccctagctgctgtgggtcagtgctggggagaaaagggaa

SEQ ID NO: 13360 - DNA, 201 bp, Homo sapiens
tgtcagccaggtgtgaggggtagagaaggcattttgtccatccagtgacgtcactgcccagaaactgtcagcaaggaggaaggaaggcatgagttggtgaycgcatagtgctgactagctggacagggcataaactaactctctgtgtcaggagagctcctgaattcttcggtgtagagtccagagctgagggtcagtaga

SEQ ID NO: 13361 - DNA, 201 bp, Homo sapiens
gaaggtcagatcgacagcttagttttggcttggtggcgtggaacttcagcttgagggactccatcttggtttggtctcttgggccttgtgcaggagctcartcccaaccaatggcctcctagaaatattatttaacagttctccccttttggtcaggttctcacctaggtgagagttactaaaacagggcatcagcactac

SEQ ID NO: 13362 - DNA, 201 bp, Homo sapiens
tttataggttaaggtgtcctcattatcatgcgtttcttggagttttatcattccagctggagagagaccatttagcattcagcagagggctgcatatagayatttaagactctttgagaggatacagtgtaacagggaaactactgtaatgactctccccaggataatactaagagtttacaatatgacgcttagccaggg

SEQ ID NO: 13363 - DNA, 201 bp, Homo sapiens
gtatatcaagttgttcagcttctgtttatagggctttaggcacagaacagttcctgttcttagttggagaattgtagctagttattggaagaaactggaaraattcagaattcaatccatcttataggtagatgataaaaacttgaaaatgatcaacaaggctacaatctaataacagatgtactatagtttttctttagg

SEQ ID NO: 13364 - DNA, 201 bp, Homo sapiens
gggaagtttgtacaaaatgtcaaaggtttaaaattaaaacacttaatcagcctgggcatggtggctcatgacggtaatcccaacactttgggaggccgagkcaggaggataccttgagcctaggggttcgagaccagtctgggcaacataggaagaccccatttctatattaaaattttaaaaaattagccaggtgtggtg

SEQ ID NO: 13365 - DNA, 201 bp, Homo sapiens
ggtggctcatgacggtaatcccaacactttgggaggccgaggcaggaggataccttgagcctaggggttcgagaccagtctgggcaacataggaagacccyatttctatattaaaattttaaaaaattagccaggtgtggtggtgtgcacctgtggtaccagctacttaagcagctgaggtgggagaattacttgagccca

SEQ ID NO: 13366 - DNA, 201 bp, Homo sapiens
caaaggatgcaccccagcttgcagatacttggataggctcaagttgctatccttgtgtgctaagggagtcaagaaggctccccaaaaagtgtgtggtgggrgggtgttgaggaggttggggaaatggcatcataggatgtagctcacctcactctgctaaatacttttgacgtctgactctggtaaatacctccatctact

SEQ ID NO: 13367 - DNA, 201 bp, Homo sapiens
ggaattccagatcccctaaggcatgttctccaccctctggaactgatcccatttagagccccagggacaaaggcaataccagggcttttcctggggggtgrggggctggggggatggcgaggagcagggcaaactccttcaacatctctcagcccccatccctggccccgattagtaatggagaaacagataccattatga

SEQ ID NO: 13368 - DNA, 201 bp, Homo sapiens
tagttttcttccagattagagaagccaaattcaaatctctgtctctgtagcaccagctataaataatatgtaccctcccaccagaatggcatctagaaaascagtttcttctgtagccattaaggattattaggaaatgcctttgaaagctgaaatgccaagcattgtccctggaacaagatacctctgagctgggggtag

SEQ ID NO: 13369 - DNA, 201 bp, Homo sapiens
cgtgtcattgaaaagtggcagcagagagtctgcatgtcaatcatccctttgaaatgaaaggccttcctggcagggacatggtgctatctttggccctaagrtgtgtaattgagaatattcaaacagggcactctgttcctttggctgaaccagggtgagtggccctgagtgggaagctgtgggcaagttagtgtggcacaa

SEQ ID NO: 13370 - DNA, 201 bp, Homo sapiens
ccagggtgagtggccctgagtgggaagctgtgggcaagttagtgtggcacaaggaaccatcattcacaggctgatatttttctcccagtgagcatgagccrcaggggtgcagccactgcccagcccccaggggaggggttgacactggtacagcagccagggcaagacaaccgattggagttctgtagggcctgacacctg

SEQ ID NO: 13371 - DNA, 201 bp, Homo sapiens
gcccagcctgtttagcaaacacctgggccctgaagggcgggccagctgtgtcaggtccccatcaggttggagccagagcccagctggaaggaaacaaaggygtgggagagggaggggctggttggctgcaggttctggctggagcttggcaacctagaggctggaacttccgggtcaaggggcttctccgtgggcctcagg

SEQ ID NO: 13372 - DNA, 201 bp, Homo sapiens
ggtctcccatatgcaagtgccaccatgctagtgtgatttggacttcagtaaaagttagtttgcttccttcccgttgtcccatctcactcctgggccacccrtggggctgctggtagctggtgtgtggctgctgctggactgtgtggcagtccatccatctgtcagcagccactgcgggcctacttgctgggtgcccagcac

SEQ ID NO: 13373 - DNA, 201 bp, Homo sapiens
aattcataggacttgtcagctaactggatgacgggtttttgaagagggggatggtgtgggtggcagggagggggactggttgctgggtgaggtaaacacargtggcaaagcaggttgagagaggggtgattcagtcttggggatggtgggggaggggctgtatccagacacctgagtggaggccaccaggaagaaccagga

SEQ ID NO: 13374 - DNA, 201 bp, Homo sapiens
ggcagggagggggactggttgctgggtgaggtaaacacaagtggcaaagcaggttgagagaggggtgattcagtcttggggatggtgggggaggggctgtrtccagacacctgagtggaggccaccaggaagaaccaggagtctaggacaggtgaggtctgagatgcagagggttcagatggcaaatcatttggacaaagt

SEQ ID NO: 13375 - DNA, 201 bp, Homo sapiens
gaaggtcaccaaggagcttccctagaacggcttcaactgagggttgtggggatggccagagagcagtctgaggagcaagggcagacgctgttccaggaacrttggcagcatggggacacgggaaggaaatgcggttactcgagaaggaaggagggcctctcttcatccccatcctccttcccttcccatcctttccttttt

SEQ ID NO: 13376 - DNA, 201 bp, Homo sapiens
gagggcctctcttcatccccatcctccttcccttcccatcctttccttttttaagggttagactagaaggattcgaatctatctgtaggcctagttgggcrgctgtagtagaaaagaggaatgatgagagatggctaggaagaagttcctgaagagcgtgaggcgtgggagccagaactcggaggagacattggcctggga

SEQ ID NO: 13377 - DNA, 201 bp, Homo sapiens
ccatcctccttcccttcccatcctttccttttttaagggttagactagaaggattcgaatctatctgtaggcctagttgggcagctgtagtagaaaagagkaatgatgagagatggctaggaagaagttcctgaagagcgtgaggcgtgggagccagaactcggaggagacattggcctgggaggtgggtgcgaagcttct

SEQ ID NO: 13378 - DNA, 201 bp, Homo sapiens
tgtgttgcctagggtggtcttgaactccagggttcaagtgatcctccctcctaggtctcccaaagtgctgggattacaggtgcgagccactgcacctgacytggtttattatttgtcggcaaaccaaaccccaaatagatgtatcttcaattttgttcatgaaaaagtgtcagtccataaatgccgtaacttacattatca

SEQ ID NO: 13379 - DNA, 201 bp, Homo sapiens
agcactttagatgtatggtcatggaatcctcacaagtcttcaaggtagatggtgtcatcctcatttcaaagatgagaacacaaaggttcggagcagttgaygcgttgcccaaggtcacacagcaagagcaaagcagaaccagtccttgaacgaggtctgccagagcccggggcctgttctcagctgccagcttgggataag

SEQ ID NO: 13380 - DNA, 201 bp, Homo sapiens
tgcgggacgcagcaggatttcacatgctctatccccgggaaggccactgagagtcagaatggcatgaggaggaaaaaggagatcaaatattttgagggaamttggggggaggtggagagaaggtggtcatgcctggggcatgggggtggcccctggctctctgtatggcagagcatcaggtgcagtggccggtgctctgta

SEQ ID NO: 13381 - DNA, 201 bp, Homo sapiens
acctcggaggactcttgccaagaaggaacaaatccatgtaccagcaggagctgctagagggagcccagccttgtacacagtggaggccccaggtgctaagraggcctcacaaggccgctgttggtgcgcagaggctctcttaaaagtttgtgtgcaggtgctctcagagacatggccctgctgagagattgtgtttccaag

SEQ ID NO: 13382 - DNA, 201 bp, Homo sapiens
tccttacacacacacgtacatcctcatggcacattttcagccctggggtatctcaaaagcaacagctcaagcaatcctgccaaggtctctcaaagtgatcyttttttttttttttttttggaagacagaatctcgctctgttgcccaggctgggagtgcagcggcacgatcttggctcactgcaacctccacctcctgggt

SEQ ID NO: 13383 - DNA, 201 bp, Homo sapiens
ttggaccagattgctgacacacgtagctgctaatccccaaaattaatgaaggtgatcaaatagcatgcccaagatcacacagctagtaagttggtagaagrgggctttgaaccaggtccgtctggctccaaagccaatgttgtttccacagtgtcccactccatgggactggagtgaaatatttgggagggagggaacatt

SEQ ID NO: 13384 - DNA, 201 bp, Homo sapiens
ccacctgtcaggttcatgccattctcctgcctcagcctcctgagtagctgggactacaggcgcccgccaccacaccaggctaatttttttatatttttagkagagacggggtttcaccatgttggtaaggatggtcttgatctcctgaccttgtgatctgaccaccttggcctcccaaaatgctggaattacaggtgtgag

SEQ ID NO: 13385 - DNA, 201 bp, Homo sapiens
cctgcctcagcctcctgagtagctgggactacaggcgcccgccaccacaccaggctaatttttttatatttttagtagagacggggtttcaccatgttggkaaggatggtcttgatctcctgaccttgtgatctgaccaccttggcctcccaaaatgctggaattacaggtgtgagccaccacgcccggcctgggagcttt

SEQ ID NO: 13386 - DNA, 201 bp, Homo sapiens
tgaccttgtgatctgaccaccttggcctcccaaaatgctggaattacaggtgtgagccaccacgcccggcctgggagctttatttttaagtaaacacttaygtacctactatgtgctagtcactgttatggcattttaataacattaaccccttcagttctcagaacagcccccctgaagttggtggtattattattattg

SEQ ID NO: 13387 - DNA, 201 bp, Homo sapiens
ctgctcacaaatggggaatctgcgtgcaaggacactctgaggcctccagaccaacttcccacccaagcaattatttgtgcagtcaatatttttgagtactyactatgtgctaggcactgtggcagcagatatgtacaggcagatgcattctctgcttgtgcagaccctacagcatacagcatcccttctaggaaggcaccc

SEQ ID NO: 13388 - DNA, 201 bp, Homo sapiens
ttaagggtggaaagtgccaaatggagagacttttagtagatcaagggagaaggaaagagagagtgaggggtggtgtaatcattatgatcattccgtcattrtgaatgatcatcataatcattcgatcattacagttatgcaaaccattgacgttcttgtaatagcttgggctggtgtatgtgccaggctctgtgctgggca

SEQ ID NO: 13389 - DNA, 201 bp, Homo sapiens
catcataatcattcgatcattacagttatgcaaaccattgacgttcttgtaatagcttgggctggtgtatgtgccaggctctgtgctgggcaccttccctrtgttacctcattcagtcatggggccacttctggaggcagggcacaggaatggagaggtaaactgaggcccaaggacagcaaagtggaacacagaggagac

SEQ ID NO: 13390 - DNA, 201 bp, Homo sapiens
gggcccacctaagatgtgaggtccggcagctgtgagcacatcagccctgaaagaaatacaggccctgcttcccctcctgcccccagtcgccatttcccagmcttggtgggcagctaaaccctggtctttcagagagggcccagtttttccagagccatgtcgtgtgtatgaacctgctggtctgattatgtctagtggtct

SEQ ID NO: 13391 - DNA, 201 bp, Homo sapiens
gccctgcttcccctcctgcccccagtcgccatttcccagacttggtgggcagctaaaccctggtctttcagagagggcccagtttttccagagccatgtcrtgtgtatgaacctgctggtctgattatgtctagtggtcttggctcggagctggcctgattagtgagttgcaggaggggtggctgtgggcctggagagaga

SEQ ID NO: 13392 - DNA, 201 bp, Homo sapiens
cgcctggtggccctgaaaaagtttgtggcagtgctggccaaggtgagcagggccatggcttcccttgtctgtgcaattctacggatggtcagtgtgcgttsctgtaagctgggcaccccgtcagcccctccctccagaagcccatggtctggctggacacctggacccacagctctccctgtccaccataggtgataccct

SEQ ID NO: 13393 - DNA, 201 bp, Homo sapiens
gcctctccttgggaacttcctgccagcctgatccctccttcccacctccctgtcctggccccctggcttggtcacatgaatgcgtggtgacactgagaggrcctgacagggacatttcagcctaaggcaggacagtcgttggcccctcactgaagtcccatgcaaaatgagcccttgttcttcagtccattgccataatag

SEQ ID NO: 13394 - DNA, 201 bp, Homo sapiens
catgtgtccctcagggtgccgttcttgccaagaaggtgaactggattggctgccaggggagtgagccgcatttccggggctttccctgctccctgtgggtyctcttccacttcttgactgtgcaggcagctcggcaaaatgtagaccactcacaggaagcaggtacgtccaggacccgttcaccccactgtgcctccaacc

SEQ ID NO: 13395 - DNA, 201 bp, Homo sapiens
gtgtccctcagggtgccgttcttgccaagaaggtgaactggattggctgccaggggagtgagccgcatttccggggctttccctgctccctgtgggtcctyttccacttcttgactgtgcaggcagctcggcaaaatgtagaccactcacaggaagcaggtacgtccaggacccgttcaccccactgtgcctccaaccctg

SEQ ID NO: 13396 - DNA, 201 bp, Homo sapiens
gccccactggctcccagctgccagaagatggggagagtcagccttggggctctggctggattgctctatctgcaggtagccccacacggccagaatagaaycaatcccaggagggagcagactttaggaattcaaccagtcctgttttcggccccgggagctctggggctgaggcttctccctgtctttctccgggcttat

SEQ ID NO: 13397 - DNA, 201 bp, Homo sapiens
gtggacctctagtgtgaggcagggggacagagaggcctgcagtgcatcagggctagggccgtggtggagagaaagatgtggggtgaagagagggcaggctsgacgccattgggaaggggcccgaggccttacggggtgagttgaggggtgatgggtgagtagggattccgccaggagaggagcatcccagcagagggagca

SEQ ID NO: 13398 - DNA, 201 bp, Homo sapiens
catgactgggttagagggaacttctttatgatcatccttttccccagttggaatgatcccttatcaggggataaatggatgacgcagtaaagaaaaaacaytaacgggagtgaaatcctggaggtgaggagtggggtaacccgagcagcagcggagacagaggctgagcaacgccagggccgtgtggtgaggccttgtggt

SEQ ID NO: 13399 - DNA, 201 bp, Homo sapiens
ttaaactccagggagctgggtcgggagggagccatctgtggacaggaggcggtttgtgtgtcgggagggagcggtgcacgtggctgtgacagcctcccggkggggggagaccagggcggagccgaggttaaaggagctgaatggagcaggtggtggtgcaggcgcctgcacttggtcgtggtctcctggggcctcctatcg

SEQ ID NO: 13400 - DNA, 201 bp, Homo sapiens
aaactccagggagctgggtcgggagggagccatctgtggacaggaggcggtttgtgtgtcgggagggagcggtgcacgtggctgtgacagcctcccggggkggggagaccagggcggagccgaggttaaaggagctgaatggagcaggtggtggtgcaggcgcctgcacttggtcgtggtctcctggggcctcctatcgaa

SEQ ID NO: 13401 - DNA, 201 bp, Homo sapiens
agcagaccgaccaaagactgcaaaacagatcaaaatgagtattcttgccctttcccatgtctggtactggggtaaaggctggttgtaaagtccacatagcrggacagtgggtctggccaacaccgggaaatgactgagatggcgctcttcacgcttccctggaaaaccacggagggccggggctgaggggtaggtggatct

SEQ ID NO: 13402 - DNA, 201 bp, Homo sapiens
tggccaacaccgggaaatgactgagatggcgctcttcacgcttccctggaaaaccacggagggccggggctgaggggtaggtggatctgcctcctcctccwtgctgccatctgttgagctcccactgtgggctagtgtttgtaatctgtattttctaattacccatcctctggaagggcagtggcgagccctttctgcaga

SEQ ID NO: 13403 - DNA, 201 bp, Homo sapiens; identical to SEQ ID NO: 1511

SEQ ID NO: 13404 - DNA, 201 bp, Homo sapiens; identical to SEQ ID NO: 1514

SEQ ID NO: 13405 - DNA, 201 bp, Homo sapiens
tggggtctcggtgacacagttcactgtttgctgcagaggaggccccactcgcagccttggcctctgccctgcagaagaattccctgtaactcactcaccartggccgtgggagccagtggcctcggcgagggtcagttggactgcatagctgccggctgagtctctctggccaccctcactggccccatcactccaggttg

SEQ ID NO: 13406 - DNA, 201 bp, Homo sapiens
acttaaatatgttttcgaatgtttgtaataaaatatttcttttggaaggcaaaaatagcaaggaaaataaataggattaaaggatactaaagcccattcartaaaatttgtaggaggccactgatttggcctaggctcctatgatgtaaccaacagaccaaaccaatatggagtcattcatgctaaatgaaactagttagg

SEQ ID NO: 13407 - DNA, 201 bp, Homo sapiens
gcctggaagcttagctggggctgtgggaggggcctccagtcctctccccatgggcctctccatgggctgctcagacttcctcacggcatggtggctgggcycttcagggtggccttttcatgtgctagcctcagaagccacctagcatgacttttgcgattttctgttggttgaggttgatgtaacggctcgcccaggatg

SEQ ID NO: 13408 - DNA, 201 bp, Homo sapiens
gcgagccctttctgcagacaaggaagctggcgttctgagtggaggagtgtggtctgggtttttgggtgggactgatgtcaccaccagcctgtgtatgcttycctctgtaggtgcccccagcgaggacccccagttccccaaggtgcagtggccaccccgtgaactttgttctgcctgccacaatgaacgcctggatgtgcc

SEQ ID NO: 13409 - DNA, 201 bp, Homo sapiens
gcagacaaggaagctggcgttctgagtggaggagtgtggtctgggtttttgggtgggactgatgtcaccaccagcctgtgtatgcttccctctgtaggtgmccccagcgaggacccccagttccccaaggtgcagtggccaccccgtgaactttgttctgcctgccacaatgaacgcctggatgtgcccgtgtgggacgtg

SEQ ID NO: 13410 - DNA, 201 bp, Homo sapiens; identical to SEQ ID NO: 1488

SEQ ID NO: 13411 - DNA, 201 bp, Homo sapiens
gggtgctgaacacagaggccaatgtggtgagaaagtttggtgtcaccgacttcccctcttgctacctgctgttccggaatggctctgtctcccgagtcccygtgtgagtatcctgtctcctggcgtcccctctcgtccctccctgtgctcatccttccttcttgcccagaggggctgcccgcctttcacagtggccaacat

SEQ ID NO: 13412 - DNA, 201 bp, Homo sapiens
gggaattcttgggcccaattgccttaccaggtgaggtttgacatcaggctggtgtcagagaggctttccagagcatgtgcagtgattagaagggttacagygaggcctgggtgccgtcttctggcctcacagaggacaagatggaatctcgttcacatatttaataaaccttcctgtccgatgagccacccttcttcctct

SEQ ID NO: 13413 - DNA, 201 bp, Homo sapiens
gggaagggagtcacactccgccgttcctgtctgtgggcaccgggctgtcccgtgcctttccatgccctgcctggagccagagggccactgggggaattctygggcccaattgccttaccaggtgaggtttgacatcaggctggtgtcagagaggctttccagagcatgtgcagtgattagaagggttacagcgaggcctgg

SEQ ID NO: 13414 - DNA, 201 bp, Homo sapiens
gaagccagtggtaacttacaagactctgtgaccatcagcagtgccccttctcttctctccctttagccctggatgctccttgcagcccctgcaccatggtyaatacttctttctctctctatctccctctgggtcctcagctccaagatctacatggctgacctggaatctgcactgcactacatcctgcggatagaagtg

SEQ ID NO: 13415 - DNA, 201 bp, Homo sapiens
aaaggtttggttgactcccttggagggccctgtgtggaagcggaggagggcgggatggccatacctgcagcactgcatcaccagcgtctggcgttgccagmggttttgtcttatttctgctggctgtgcagagtgactgccagaattgtctcttgcaggctggaggagattgatggattctttgcgagaaataacgaagag

SEQ ID NO: 13416 - DNA, 201 bp, Homo sapiens
agaattgtctcttgcaggctggaggagattgatggattctttgcgagaaataacgaagagtacctggctctgatctttgaaaagggaggctcctacctggstagagaggtgagctgccctgaagttccctgcaattcttggatagccatggagagagagccccagtttgggagcagggcttttcctgccaattctagggtc

SEQ ID NO: 13417 - DNA, 201 bp, Homo sapiens
attcttctagcacagggaaggactgacgcctcgtctgtctctgtcagagctggctgtgccctcggccctttgtttctgggagtgaaggtggccagtgtgcygtggaagcagctctgctctcctgacactccgctcacgcctgttttcatttacagtggctggtgctgacgtgcagacgctgcgggagaggctcattgacgc

SEQ ID NO: 13418 - DNA, 201 bp, Homo sapiens
atccttttccttctccatatgtgcactcacactcatgtgtccctcagggtgccgttcttgccaagaaggtgaactggattggctgccaggggagtgagccrcatttccggggctttccctgctccctgtgggtcctcttccacttcttgactgtgcaggcagctcggcaaaatgtagaccactcacaggaagcaggtacgt

SEQ ID NO: 13419 - DNA, 201 bp, Homo sapiens
catccattttgcctccctgccacctttctccactccctcgactggttgaccaggtggtacatagacttcctttctcatttttgtctttgatgtgggtatgyccacctggcagttttcctatctctgttccgggcctctcctgacctgccgcctccagctccttagcttctgggccacatccttctctctcttcccccgctc

SEQ ID NO: 13420 - DNA, 201 bp, Homo sapiens; identical to SEQ ID NO: 1485

SEQ ID NO: 13421 - DNA, 201 bp, Homo sapiens
aattgcttgaaccctagaggcagaggttgtagtgagccaagattgtgccactgcactccagcctaggcaactgagtgacactctgtctcaaaaaaaaaagaaaaaaaaaaaaaagaaaaaaaggaaactgcttttcacccttggactggtaaactctgtcaggcgtctagactaggctggggcttggataggtaatgggaa

SEQ ID NO: 13422 - DNA, 201 bp, Homo sapiens
aactgttacaaagctgtgtttgaaaaaggccaaaggagtggttcagccatttcttatgggaacccaggggaggggaaagtcacagagggctaatctgatcmccagaggccttcatgccagtagttatttattacacgcttgccttatgccagcactttgctaagggccttcacaggccattattatgacaatccttacccg

SEQ ID NO: 13423 - DNA, 201 bp, Homo sapiens
tccttttaagaacagatcaatacttcaagaaaaccttgttttaacagagaggaccaaattctgatttttcatcagtgtacttttgatattaaggctcatcaaaaaaaaaaaaacacaaaaactataagttagcccattcgaccacacttgaagttcttttctcttcacaacttccttgtatccattggtttgtcctgtact

SEQ ID NO: 13424 - DNA, 201 bp, Homo sapiens
cagggatccccggcacgggagttatcacacccaaggcatgagggctttgtcacccccgctctggtggaaagtggcacgagatctctgatgatgccttacctgccagcctgcccagtgcagggcatcaacagcttaattaacgtctgaacagcttccaaggctctcaaataggaggccctggatagcccagggcagcaaggc

SEQ ID NO: 13425 - DNA, 201 bp, Homo sapiens
gaagaggtaacacggaggtcaaattcataggacttgtcagctaactggatgacgggtttttgaagagggggatggtgtgggtggcagggagggggactggttgctgggtgaggtaaacacaagtggcaaagcaggttgagagaggggtgattcagtcttggggatggtgggggaggggctgtatccagacacctgagtgga

SEQ ID NO: 13426 - DNA, 201 bp, Homo sapiens
taacctgtctgtaaataaacaagagcaccatcaccatgaataactgcagcgcaacatcaccctcgggtttcttttttgtttttaaattttatttatttttmatttttaactttttgtagagatggggcctcactgtgttgcctagggtggtcttgaactccagggttcaagtgatcctccctcctaggtctcccaaagtgc

SEQ ID NO: 13427 - DNA, 201 bp, Homo sapiens
actacaggcgcctgccaccaagcctggctaattttttgtatttttagtagagatggggtttcaccatgttgcccagggtggtctcaaactcctcagctcargcaatcggcctgccttggcctcccaaagtactgggattacaggcataagccactgcacccagcccaaagcaatccttttaaagaactttaggaaggaggt

SEQ ID NO: 13428 - DNA, 201 bp, Homo sapiens
ttatttgtgcagtcaatatttttgagtactcactatgtgctaggcactgtggcagcagatatgtacaggcagatgcattctctgcttgtgcagaccctacagcatacagcatcccttctaggaaggcacccaacctcacttgaatgcctgtggtgtcagtgagttcactgccttttcaggtcacctgtgtgtgtgtccaca

SEQ ID NO: 13429 - DNA, 201 bp, Homo sapiens
tttgtgcagtcaatatttttgagtactcactatgtgctaggcactgtggcagcagatatgtacaggcagatgcattctctgcttgtgcagaccctacagcatacagcatcccttctaggaaggcacccaacctcacttgaatgcctgtggtgtcagtgagttcactgccttttcaggtcacctgtgtgtgtgtccacagtc

SEQ ID NO: 13430 - DNA, 201 bp, Homo sapiens
tgcagtcaatatttttgagtactcactatgtgctaggcactgtggcagcagatatgtacaggcagatgcattctctgcttgtgcagaccctacagcatacrgcatcccttctaggaaggcacccaacctcacttgaatgcctgtggtgtcagtgagttcactgccttttcaggtcacctgtgtgtgtgtccacagtcgtaa

SEQ ID NO: 13431 - DNA, 201 bp, Homo sapiens
tggccctgaaaaagtttgtggcagtgctggccaaggtgagcagggccatggcttcccttgtctgtgcaattctacggatggtcagtgtgcgttcctgtaagctgggcaccccgtcagcccctccctccagaagcccatggtctggctggacacctggacccacagctctccctgtccaccataggtgataccctccagcct

SEQ ID NO: 13432 - DNA, 201 bp, Homo sapiens
accactcacaggaagcaggtacgtccaggacccgttcaccccactgtgcctccaaccctgctctgttcggccctccaaggggagagggggcagggaagctcccttgaattgccccactggctcccagctgccagaagatggggagagtcagccttggggctctggctggattgctctatctgcaggtagccccacacggcc

SEQ ID NO: 13433 - DNA, 201 bp, Homo sapiens
ctgtttcatgtcctgttccatcggtagagttacacactttcctgagactttatatggtggtgctgctgggtgccagcccttcttccctccaacagtggcartaaccactgttgtgtgttggtgtcaaggagtggggacaccctgaaggaatccgccttttctagagctctcgctccattccctacatcgaggctgaagtgc

SEQ ID NO: 13434 - DNA, 201 bp, Homo sapiens
taatggaaaatattgttacaaaaacagttctgtatagtatgatcttattttatttatttattttttatttatttattttgagacggagtctcgcactgtcrcacaggctgtagtgcagtggcgtgatctcggctcactgcaagctccgcctcccaggttctcgccattctcctacctcagcctcctgagtagctgggacta

SEQ ID NO: 13435 - DNA, 201 bp, Homo sapiens
tgttacaaaaacagttctgtatagtatgatcttattttatttatttattttttatttatttattttgagacggagtctcgcactgtcacacaggctgtagygcagtggcgtgatctcggctcactgcaagctccgcctcccaggttctcgccattctcctacctcagcctcctgagtagctgggactacaggcgcccgcca

SEQ ID NO: 13436 - DNA, 201 bp, Homo sapiens
tcccaatacgaaggccaaggggcaattaccatttatcatcacatttgtgctgttgatttggaagagggaaatatttccctgcactgtgtctctaactgcattttttttttttggcttgtttcctttaggcaggttcttgctctgttgcccaggctggagtgcagtgacacaaacacagttcactgcagcctcaacctccca

SEQ ID NO: 13437 - DNA, 201 bp, Homo sapiens; identical to SEQ ID NO: 1481

SEQ ID NO: 13438 - DNA, 201 bp, Homo sapiens
cttgttgtcccctccccaaaataaccattctgacttgcatgccacttgctgttgctgctcctgcttccttgtagtcaacaacttgtccccctattaaaacytttaggagaagtgcttctacagaagggatgggctgatgcattccctgggcaacactgcgtgaggggctggtggccgtggctcaccctctgggactcatcc

SEQ ID NO: 13439 - DNA, 201 bp, Homo sapiens
actcttgccaagaaggaacaaatccatgtaccagcaggagctgctagagggagcccagccttgtacacagtggaggccccaggtgctaagaaggcctcacraggccgctgttggtgcgcagaggctctcttaaaagtttgtgtgcaggtgctctcagagacatggccctgctgagagattgtgtttccaagtgtcagttgg

SEQ ID NO: 13440 - DNA, 201 bp, Homo sapiens
gcagagataaataaaatgtcgtcctgcttcctggtcagaggtgggtgcatgggtgagtggtggattcaggttgaagttcattgcagctggagtggcgggartggagggcaatgtgaggtgagtttgggtttggagcctggaaggccttgaatgcagtgagtttggacattattcattgacagtggggagtcatggaagaga

SEQ ID NO: 13441 - DNA, 201 bp, Homo sapiens
agcagccagggcaagacaaccgattggagttctgtagggcctgacacctgagctttctgactctgcctgggagaggctgggcacagcagggatgaaggagkcggcctaggcccaggaggtcagaggctcctcagcgccaccccatgtcacgcagcgcacgcagcctggatgcctcaggtgagtcaccatctcctgaactgc

SEQ ID NO: 13442 - DNA, 201 bp, Homo sapiens
ggcagccaagtttcaagcagaactgtgagccagaactcagcttaattaccccagcagcatccatccgggaagtaaggccgtggctccaccaggaacatccmgctctaactccatgtgacctttctgttcctcgagcccagtgcaacccccactggattcagggtttccacacctaatagaagtcccttcctaaactgttac

SEQ ID NO: 13443 - DNA, 201 bp, Homo sapiens
tttgaagaggtaacacggaggtcaaattcataggacttgtcagctaactggatgacgggtttttgaagagggggatggtgtgggtggcagggagggggacyggttgctgggtgaggtaaacacaagtggcaaagcaggttgagagaggggtgattcagtcttggggatggtgggggaggggctgtatccagacacctgagt

SEQ ID NO: 13444 - DNA, 201 bp, Homo sapiens
tgaaaggccttcctggcagggacatggtgctatctttggccctaaggtgtgtaattgagaatattcaaacagggcactctgttcctttggctgaaccaggktgagtggccctgagtgggaagctgtgggcaagttagtgtggcacaaggaaccatcattcacaggctgatatttttctcccagtgagcatgagccgcaggg

SEQ ID NO: 13445 - DNA, 201 bp, Homo sapiens
atgcctcagacaccccaccaccctagtccagtactctccaaaggagtcaccccaggaagatcggcttgtgtgtcactcgcatctctcagctgtgctcaaayctgctattttctttgtccccagtggggctgtttgcagccggtatgggggaaaagaatgagatacagaaaagtccctgagctgggcagaggcatcaccccc

SEQ ID NO: 13446 - DNA, 201 bp, Homo sapiens
gcccaggaggtgcgatgccaccaaggacagggaggcactcgctttccgggcaggcccagaaagtgccagtgatggtggggagagaaggcattgtctcctcyctccgagttggtggaggggaaaattgtttgtgacgatgctgcctcccgagccatctgctcaccgagaaacccaggatggtggagtggaatgaagccgtgc

SEQ ID NO: 13447 - DNA, 201 bp, Homo sapiens
agatgctggagaaggtcattgactccagctctttttggctttctggagcctgggcaggtagagaggtgggtggaggaggaaggatactccaggtggaaaamcagcatgtgccgagctatggaggtgaggttcgtaaggcgtgtgtttgagtgacagtgagcagtgttggttttgccccccttctcttccacggcacaggcc

SEQ ID NO: 13448 - DNA, 201 bp, Homo sapiens
agaggaatggatctgttagcaggttttcctgttcagttaccattcgtgtctccagtatccttctcctctcaaatgtttgtctttgctttctttgctgtgaktttctcagggtcctcatcccctcggccagcctctttgtggttttatctgatcagcctgctgctgtgtccctctttctcctgccctccgccccttgtgctg

SEQ ID NO: 13449 - DNA, 201 bp, Homo sapiens
gtcagtgagaaatgctgacttcaagctgtaaatttgtgtgtgagttccagaggcccgtgtgggctcaccaggagggcacgtgtcaaagcgtggtcttttcyggccatttctcactctgggggaaggtgtccagcccaacgtttgataggaatatttaatggctttctcagaggaatggatctgttagcaggttttcctgtt

SEQ ID NO: 13450 - DNA, 201 bp, Homo sapiens
gtggccactgggtggcgtgtgggcaccagggtttccttgctcccagttgtccagagctccttaattcatccatccttctggcactgtcgccttagaaggcrgaagtttctaagtcaggatgatggcaaaggtcagtgagaaatgctgacttcaagctgtaaatttgtgtgtgagttccagaggcccgtgtgggctcaccag

SEQ ID NO: 13451 - DNA, 201 bp, Homo sapiens
ccgctggctcagcctcccttggccctggggcccggatctgagcccaccctcctcagtgtgggtctgcaggaagctggggctgccctcgggtgatttgtgcytctccttgggaacttcctgccagcctgatccctccttcccacctccctgtcctggccccctggcttggtcacatgaatgcgtggtgacactgagagggcc

SEQ ID NO: 13452 - DNA, 201 bp, Homo sapiens
gtaaggctggtcagtgtcaagccaaccaggggagggtggcaacgtgaaagcaacaaaggagagcaaccacaaaatgtggcacgaaagttgacaaatgctcrccatgggaagacaaagcaggcagtaataacatctgtaccagagagaggccaggagggcggggagagatcactggagtggctgaagagaaggtcaccaagg

SEQ ID NO: 13453 - DNA, 201 bp, Homo sapiens
ctctgtgctgggcaccttccctgtgttacctcattcagtcatggggccacttctggaggcagggcacaggaatggagaggtaaactgaggcccaaggacascaaagtggaacacagaggagaccttgccctgaggaggagcataggcagccacaatgcgtaccccattagttgaccttattggctctttccaacctcagga

SEQ ID NO: 13454 - DNA, 201 bp, Homo sapiens
attgatatttcaaacaaacaataattagtaatttctaaagggatcttttccctttagaaaaatgttatgagaaggccctggggaatcctggacatcagagrgcagtcttggggtgtgaaggtcttaaagacaagaacgtgctggctcagtgcaaaaaacaaacgagaattaaaatgaaaccacattttattgtgctcttta

SEQ ID NO: 13455 - DNA, 201 bp, Homo sapiens
ccttgtatcagccccaagaagggccagcttagttgccttctttccagggatgcgtcagggtgtgccaggctcttcctgcatctgtctcgtggaggtgaggstaacactccttccccaggcgtaacgtgttcttaggagctctgataccttctgaaattgtgttcttctgagacgtcgtaaggagtaagttctagggtggag

SEQ ID NO: 13456 - DNA, 201 bp, Homo sapiens
ggacccctccacctgcccggtgggcagcctcctactccgggagcgcgtccctcttccagtcacctccgcccacctcttcctctccgcgcatcccacgcccmccaccttcatgtttctcagctccatttttgcctcccgctcccttgccttttcctcttggccctcatcccgagcttctttccctctccgcggcctgggccc

SEQ ID NO: 13457 - DNA, 201 bp, Homo sapiens; identical to SEQ ID NO: 1510

SEQ ID NO: 13458 - DNA, 201 bp, Homo sapiens
tgggccacccgtggggctgctggtagctggtgtgtggctgctgctggactgtgtggcagtccatccatctgtcagcagccactgcgggcctacttgctggrtgcccagcaccgcactcaccactgcaggcgtggccaggagcgtgagatccccagagcccatggccagtgagaggcggccagggataggtacccagggaat

SEQ ID NO: 13459 - DNA, 201 bp, Homo sapiens
aagacaaccgattggagttctgtagggcctgacacctgagctttctgactctgcctgggagaggctgggcacagcagggatgaaggaggcggcctaggccyaggaggtcagaggctcctcagcgccaccccatgtcacgcagcgcacgcagcctggatgcctcaggtgagtcaccatctcctgaactgcctggctggctgt

SEQ ID NO: 13460 - DNA, 201 bp, Homo sapiens
tctccaggcagcctggtttctgccagtcctctcctcctccaccttgctcaggcagttccctgcccactggaccgacggtctaggttcaactctgtttccayctttcctgctgagcccatgccttggtctgcagggccgacctctccaaacttgagagttctgtgccacatgatttggcccctgccactgccctctcacggc

SEQ ID NO: 13461 - DNA, 201 bp, Homo sapiens
gctgcagatggacttattctagaatttcttccttcttgagagtgctggggggaaagattagcttccagctgactcacatgtttggcctcttgcaatgcagrgtttttagttttcctatgagttgcatgtctagatactgacccattctgctcctggatgagggttaccacttccaaacaggattccccagtgcatggagcc

SEQ ID NO: 13462 - DNA, 201 bp, Homo sapiens
cccggatctgagcccaccctcctcagtgtgggtctgcaggaagctggggctgccctcgggtgatttgtgcctctccttgggaacttcctgccagcctgatscctccttcccacctccctgtcctggccccctggcttggtcacatgaatgcgtggtgacactgagagggcctgacagggacatttcagcctaaggcaggac

SEQ ID NO: 13463 - DNA, 201 bp, Homo sapiens
gagtagctgggactacaggcgcctgccaccaagcctggctaattttttgtatttttagtagagatggggtttcaccatgttgcccagggtggtctcaaacwcctcagctcaggcaatcggcctgccttggcctcccaaagtactgggattacaggcataagccactgcacccagcccaaagcaatccttttaaagaacttt

SEQ ID NO: 13464 - DNA, 201 bp, Homo sapiens
cttctccatggataatccacggtgttggaagtggttaaggtaatggatcctcatgggcttaccataaaaatatctggaggctggaccattttccttaaaaygttataaaagctggaattgaatgccatcggtgtcacccctgggaagtgtgctttctcttgagctcttttggccccaagatagcagtcactccatagtttc

SEQ ID NO: 13465 - DNA, 201 bp, Homo sapiens
acctatcatttcaggcaccttactaagtactcggcatacattgtctcatagtttcctttccacaatttaaagattcctgtggtgtcacacatccacctaayccaggtagtgggtatttggcgggcaggagtggtatagtgatagtgatttgttcctgacttgctgcctctgaatggagttacttcctgactctggtgctag

SEQ ID NO: 13466 - DNA, 201 bp, Homo sapiens
catgtcatcttcctgccaggttccctagctgctgtgggtcagtgctggggagaaaagggaacggacatccattttgcctccctgccacctttctccactcyctcgactggttgaccaggtggtacatagacttcctttctcatttttgtctttgatgtgggtatgcccacctggcagttttcctatctctgttccgggcct

SEQ ID NO: 13467 - DNA, 201 bp, Homo sapiens
agtgtagaaccttctgctggtgccgtggatcctcttgactcagaccgggggtgtcagccaggtgtgaggggtagagaaggcattttgtccatccagtgacrtcactgcccagaaactgtcagcaaggaggaaggaaggcatgagttggtgaccgcatagtgctgactagctggacagggcataaactaactctctgtgtca

SEQ ID NO: 13468 - DNA, 201 bp, Homo sapiens
agcttgcagagataaataaaatgtcgtcctgcttcctggtcagaggtgggtgcatgggtgagtggtggattcaggttgaagttcattgcagctggagtggygggagtggagggcaatgtgaggtgagtttgggtttggagcctggaaggccttgaatgcagtgagtttggacattattcattgacagtggggagtcatgga

SEQ ID NO: 13469 - DNA, 201 bp, Homo sapiens
ccaagtttcaagcagaactgtgagccagaactcagcttaattaccccagcagcatccatccgggaagtaaggccgtggctccaccaggaacatccagctcyaactccatgtgacctttctgttcctcgagcccagtgcaacccccactggattcagggtttccacacctaatagaagtcccttcctaaactgttaccacat

SEQ ID NO: 13470 - DNA, 201 bp, Homo sapiens
ccctcaaatgatgttcccctttagatggtcatggtcatcagcaggggtgggtgcatcgatcctgtggggtcttggtggtcgcagaccaagcgtccctcttytcacatctaattcacaacgtctcatcgctccgcgggagcccaggaactgccctacaacagccgaaatccgggtcgtctattccaacggactcctcttccg

SEQ ID NO: 13471 - DNA, 201 bp, Homo sapiens
ctctaggttatatctttgttattgctcttatctgtttaagtttcaagattctgtttgaacaatggtttccaagtctttaaaaagtcgaaaatcccccttcygatgagatacagaaaccccagactttaaaactctcagtcttaaacctctttggcaccattgccaagaaacttttctctattccattcaaatagtttgtat

SEQ ID NO: 13472 - DNA, 201 bp, Homo sapiens
tcacctgctagagggcccaggaggtgcgatgccaccaaggacagggaggcactcgctttccgggcaggcccagaaagtgccagtgatggtggggagagaargcattgtctcctctctccgagttggtggaggggaaaattgtttgtgacgatgctgcctcccgagccatctgctcaccgagaaacccaggatggtggagtg

SEQ ID NO: 13473 - DNA, 201 bp, Homo sapiens
aatgataggtttgttcattgatccctttatccactcatcatttagaagcaagattgagcaacttctttgtgacagtgccttcaacagctttttaaacagamgagtgtcaggacctgacatgtgtctgtaggagagaccggggtaggagatgggggtggacagtgggcacaggagagcagtcgaaagtgaagctaggaccag

SEQ ID NO: 13474 - DNA, 201 bp, Homo sapiens
gccagagcccagctggaaggaaacaaaggcgtgggagagggaggggctggttggctgcaggttctggctggagcttggcaacctagaggctggaacttccrggtcaaggggcttctccgtgggcctcaggagtgcccttcagtgggaatagaatgggactttttatggccgaaggcctggccggagcaaggggtacacagc

SEQ ID NO: 13475 - DNA, 201 bp, Homo sapiens
gtacctgtgattcccagcacagagcctggtgcagagtaggagcccactgcacgttcatggtggccagtggcctgagcctcacaggattccaaatgacagcrtgagtgtagaaccttctgctggtgccgtggatcctcttgactcagaccgggggtgtcagccaggtgtgaggggtagagaaggcattttgtccatccagtg

SEQ ID NO: 13476 - DNA, 201 bp, Homo sapiens
cggagcacctatcatttcaggcaccttactaagtactcggcatacattgtctcatagtttcctttccacaatttaaagattcctgtggtgtcacacatccrcctaatccaggtagtgggtatttggcgggcaggagtggtatagtgatagtgatttgttcctgacttgctgcctctgaatggagttacttcctgactctgg

SEQ ID NO: 13477 - DNA, 201 bp, Homo sapiens
atctctgttccgggcctctcctgacctgccgcctccagctccttagcttctgggccacatccttctctctcttcccccgctcagacccttatattttaaayccatgcacccagaggcctttggtgcgtgtttggctcttgctccatgttcccaatccctggttggggcaccaaaactatatttcctgaattccaagacacc

SEQ ID NO: 13478 - DNA, 201 bp, Homo sapiens
tagctgctgtgggtcagtgctggggagaaaagggaacggacatccattttgcctccctgccacctttctccactccctcgactggttgaccaggtggtacrtagacttcctttctcatttttgtctttgatgtgggtatgcccacctggcagttttcctatctctgttccgggcctctcctgacctgccgcctccagctcc

SEQ ID NO: 13479 - DNA, 201 bp, Homo sapiens
gttgaccaggtggtacatagacttcctttctcatttttgtctttgatgtgggtatgcccacctggcagttttcctatctctgttccgggcctctcctgacytgccgcctccagctccttagcttctgggccacatccttctctctcttcccccgctcagacccttatattttaaacccatgcacccagaggcctttggtgc

SEQ ID NO: 13480 - DNA, 201 bp, Homo sapiens
cgaagcagggggaggagagagtgcttttggtatgatggggacaggcccacacacaagtctggcctccctgagtggcatgtgtgactgtccttttcttctgyctccagccccttgtcactatgagcaaacagtgagcttctaccagcccagcctgtttagcaaacacctgggccctgaagggcgggccagctgtgtcaggtc

SEQ ID NO: 13481 - DNA, 201 bp, Homo sapiens
gaggctggaccattttccttaaaacgttataaaagctggaattgaatgccatcggtgtcacccctgggaagtgtgctttctcttgagctcttttggccccragatagcagtcactccatagtttcgtgaagaccagcctggtgttgcctggttttctgccattagggagcagctagaggtcttccagtagctcctgtgtaa

SEQ ID NO: 13482 - DNA, 201 bp, Homo sapiens
attagggagcagctagaggtcttccagtagctcctgtgtaaagtgatgaaagaaaagggctgggtgctgactgctcctggagaaaagcaacacactcccaragtcttaattgcctgcttccagggagctgtggtggtttcccttgggcagggcacacgccccagtggttgacttaataaggatacattttaatcagaggac

SEQ ID NO: 13483 - DNA, 201 bp, Homo sapiens
acccttcttcctcttctgacattggttagctctaatcttgttctctgcacttactgcctctcctccctggttctgtgccctcacaggctcatggaatccakgtccttctataccgcttacctgcagagactctctgggctcaccagggaggctgcccagaccacagttgcaccaaccactgctaacaagatagctcccact

SEQ ID NO: 13484 - DNA, 201 bp, Homo sapiens
actattgttatatatatgctaacgtttgtctagaaaaagtctagaaaaatacacactgaactgtgaatagcagttatatttagaaagcaacattaggatgracttaagtcagggctcggactagagcaaggcaagtgaggtgccaggatgcaaaagttaaggagacacctgacctcaggggcccacaactgcagagcccct

SEQ ID NO: 13485 - DNA, 201 bp, Homo sapiens
ctcaaaattaccaggcacaagctgagagccccctccacaaggcctgatcactatgactcatgactggacccttgactctgcttgttgtcccctccccaaartaaccattctgacttgcatgccacttgctgttgctgctcctgcttccttgtagtcaacaacttgtccccctattaaaacctttaggagaagtgcttctac

SEQ ID NO: 13486 - DNA, 201 bp, Homo sapiens
aaagtcaacagggccccttccgcttcagtccccatctgtaaaaatggtttatcaacctcatgttgaggttcagagttggtataatatcaaccctcatattragggttggtgtgaggactaaatgagtaccatctgtaaatccttagagcagcaggtgcaaagtgctagcccacaccatgagtatttgctcatctgattcat

SEQ ID NO: 13487 - DNA, 201 bp, Homo sapiens; identical to SEQ ID NO: 1500

SEQ ID NO: 13488 - DNA, 201 bp, Homo sapiens
tgctaacgtttgtctagaaaaagtctagaaaaatacacactgaactgtgaatagcagttatatttagaaagcaacattaggatggacttaagtcagggctyggactagagcaaggcaagtgaggtgccaggatgcaaaagttaaggagacacctgacctcaggggcccacaactgcagagcccctgacagtgagtgtctca

SEQ ID NO: 13489 - DNA, 201 bp, Homo sapiens
gccagtggacactgctggctccccctggctagctgccagccctgcaggtgcccggtcagtcaggaggccctctgcatgtcctgccggtgccttcccacccrgcctctcccagcctgtgctccctcctgtgagcagctggtaggagtggccactgggtggcgtgtgggcaccagggtttccttgctcccagttgtccagagc

SEQ ID NO: 13490 - DNA, 201 bp, Homo sapiens; identical to SEQ ID NO: 1519

SEQ ID NO: 13491 - DNA, 201 bp, Homo sapiens
tgctccgtgcagggtatctaggcacagttcatttggcaagttggtgttggctgctgcctggaagcttagctggggctgtgggaggggcctccagtcctctmcccatgggcctctccatgggctgctcagacttcctcacggcatggtggctgggcccttcagggtggccttttcatgtgctagcctcagaagccacctagc

SEQ ID NO: 13492 - DNA, 201 bp, Homo sapiens
cctgtctctgactttaggcctcatttgatgacttgcaggttcccaaaaggcctcacccctgatattaagccaaagaccacagacaacaaggtcttcttgaktctatagtcttgtatcttcattctactctaaataattagctctgtgtgtgtgtgtgtagtgtgtgtgtagtgtgtgtgtgtgcgggtgtgtgtgcctatg

SEQ ID NO: 13493 - DNA, 201 bp, Homo sapiens
ctagcaagcattgtgaactgtcttctattaacattcaccatttcataatttctagaaacatgtttcctcagcttttcatgcttattacagacccaattatrttctctatgccatacaaaaacaagatgccaaagcatatatactttagacttatgttcagcaattaatgtttcagtattttaatttacttagaaatgatat

SEQ ID NO: 13494 - DNA, 201 bp, Homo sapiens
cttgtagcccaggctggagtgcaatggtgcaatcccagctcactgcaacctccactccccgggttcaagtgattctcctgcctcagctgggattacaggtkcccgccaccacacccagctaaattttgtatttttagtagagacgggctttcaccatgttggccaggctggtctcgaactccagacctcaggtgatccacc

SEQ ID NO: 13495 - DNA, 201 bp, Homo sapiens
ggctgttggccccttactcaaactgctagggcagagggagctggggttctctctccctgggaagggtctgatgagagaaggggctggaggagaccaggtcrttcctggaaataccaggcaccggctcccaggagggagccttgccctctgcgttccctcattatggtgcttccttttcctcatcaggagtctgatggctct

SEQ ID NO: 13496 - DNA, 201 bp, Homo sapiens
gccttgtggtggggaggtgggcacctgtgctgggtgcagaagaacaagctgagaaggcagaggagagagagagaggcaggtgtgggctgctgcgggtctcrccttgccaggagtgaggagagtagggtgccaacgtcctgctgcgtggaggggtaaaagcaggagattggcttctaaaggcctgggaggtttgcggtagga

SEQ ID NO: 13497 - DNA, 201 bp, Homo sapiens
tgtagacatgatatgtgggcctccatttgtactactgactcagttcttgcaaatattaagggtagacctgtccctgatcttcgtgtgtaaaatagcacctyctctgccactctattcttaccccagtctacatttcttcataacatcggtcaccatctgatctacatttacttatgtatcatctctttacccccactggaa

SEQ ID NO: 13498 - DNA, 201 bp, Homo sapiens
actccagcctgggggacagagcgagactctgtctcaaaaaaataaaaaaataaaaataaaaaaataaagtaaagctacatatttaaaagctggggaaatayatgctgtaaatatgacaaagggctgtgactcttctgcaacacaccattttaagaatgagctaggtctgcatttattgacctgataaaatgtcccaagaag

SEQ ID NO: 13499 - DNA, 201 bp, Homo sapiens
tgactagggcagtagattctctaggcacctgctgccccggggcagagcatgtgtttctgagaacctggtttatcccctttctattccagagcagctccggktgtctcactgtatgttttggaaactggttgtatccaatttagaccttcattgctattcactggctaatcaatcagcaaatatttgttgagtgataagcat

SEQ ID NO: 13500 - DNA, 201 bp, Homo sapiens
gccccatcactccaggttgcactgctgcccagggggtttgtgccaggcctgggtcacagtggaagagagtctggaaatcacaaggcagaggaggagacctytgccaatgtgagagaacaaagttaaggggcagtccatgggggcattgaccttacttaggtgaggaggactcagggaacatctacagactctagggctagg

SEQ ID NO: 13501 - DNA, 201 bp, Homo sapiens
cccggcatgcctcagacaccccaccaccctagtccagtactctccaaaggagtcaccccaggaagatcggcttgtgtgtcactcgcatctctcagctgtgmtcaaacctgctattttctttgtccccagtggggctgtttgcagccggtatgggggaaaagaatgagatacagaaaagtccctgagctgggcagaggcatc

SEQ ID NO: 13502 - DNA, 201 bp, Homo sapiens
ttcctttaccggactgtacacctcgcctcctggggcctgaggcgggaacccgggtcgcgctgctccgaggcctcggcggaccgcgaaaggatggctcaccrcccggccagggccagcccctgcaacaagctcagccccgcccgctcccgcgcccaggagcggccggcggggcggggtggctgggccggcctcgggggcggg

SEQ ID NO: 13503 - DNA, 201 bp, Homo sapiens
gggcggtggtcgtcttctccttgtgtctccgtgcagttgtccctctcccaatccatgtccaaatttcctcttcctgcaaggacaccagtcctattggattwgggcccaccctaatgaccttattttaccttcattacctctttaaagaccctgtctccaaatacggccacattctgagaggctggggattagggcttcaac

SEQ ID NO: 13504 - DNA, 201 bp, Homo sapiens
taggtgtgggcaaaaggccatttgaagtatgggacagagctggggtgccaagagaagaaggaaggctgagggccaaggacatgttccccctccaaagcacyacattcgagggcgtatctcagaagggtccaagaatcctaaacttaaatgtggccttccagattatgatgaaggtatacatgtcaagataaaaggatagga

SEQ ID NO: 13505 - DNA, 201 bp, Homo sapiens
accctcctcttttcctgagcagcttgcagattggtttctgaagaggcgagatggaaccatgtgtacatcttttagccatatggtcctggaaaattattttyaaatgaaacttataagctgttttgacctccagtttacacttgcctacatgcctcactggtcccattagctgaacgtgcctttctgagcagtgcttcacac

SEQ ID NO: 13506 - DNA, 201 bp, Homo sapiens; identical to SEQ ID NO: 1518

SEQ ID NO: 13507 - DNA, 201 bp, Homo sapiens
taatgaccttattttaccttcattacctctttaaagaccctgtctccaaatacggccacattctgagaggctggggattagggcttcaacataggaatttkgggggacataattcagcccatagcacaggctggagaccagcaggtgcaaaggacaagcctggtgtgtgggcagcactgaaagaaggctgctgtggccgga

SEQ ID NO: 13508 - DNA, 201 bp, Homo sapiens
tactattgttatatatatgctaacgtttgtctagaaaaagtctagaaaaatacacactgaactgtgaatagcagttatatttagaaagcaacattaggatkgacttaagtcagggctcggactagagcaaggcaagtgaggtgccaggatgcaaaagttaaggagacacctgacctcaggggcccacaactgcagagcccc

SEQ ID NO: 13509 - DNA, 201 bp, Homo sapiens
aggcaactgagtgacactctgtctcaaaaaaaaaagaaaaaaaaaaaaaagaaaaaaaggaaactgcttttcacccttggactggtaaactctgtcaggcrtctagactaggctggggcttggataggtaatgggaaccactagtagagccagaggtgaacatataacaatcaccatagcactcatagatgggaactacac

SEQ ID NO: 13510 - DNA, 201 bp, Homo sapiens
gaaggcaaagcaggagaggaagcaggagggggttgggaagtgccaccctattttaagcaatcagatcttatgagaactcagagtgagaactcactcgttaycaagggggcagtgccgagctgttcatgagggatctgcccccaagatctaatacctttcactacctaatctaatacctttcacctcgtctaacattggaga

SEQ ID NO: 13511 - DNA, 201 bp, Homo sapiens
gctgggcggtggtcgtcttctccttgtgtctccgtgcagttgtccctctcccaatccatgtccaaatttcctcttcctgcaaggacaccagtcctattggwttagggcccaccctaatgaccttattttaccttcattacctctttaaagaccctgtctccaaatacggccacattctgagaggctggggattagggcttc

SEQ ID NO: 13512 - DNA, 201 bp, Homo sapiens
gtgtgggcaaaaggccatttgaagtatgggacagagctggggtgccaagagaagaaggaaggctgagggccaaggacatgttccccctccaaagcactacrttcgagggcgtatctcagaagggtccaagaatcctaaacttaaatgtggccttccagattatgatgaaggtatacatgtcaagataaaaggataggaatt

SEQ ID NO: 13513 - DNA, 201 bp, Homo sapiens; identical to SEQ ID NO: 1513

SEQ ID NO: 13514 - DNA, 201 bp, Homo sapiens
aaatataattgaatacttcactgtttttgaaagcatgaaaacaatggaaaatgcaactgatgtgagtaatccatctacttgacgtcacttttaagaaatarggccaggcacggtggctcacgcttgtaatcctagcactttgggaggccgaggtgggtggatcacgaggtcaggagtttgagaccagcttggccaacatgg

SEQ ID NO: 13515 - DNA, 201 bp, Homo sapiens; identical to SEQ ID NO: 1483

SEQ ID NO: 13516 - DNA, 201 bp, Homo sapiens
aacaggtaagtaactttccaggtttacacagatgctggagaaggtcattgactccagctctttttggctttctggagcctgggcaggtagagaggtgggtrgaggaggaaggatactccaggtggaaaaacagcatgtgccgagctatggaggtgaggttcgtaaggcgtgtgtttgagtgacagtgagcagtgttggttt

SEQ ID NO: 13517 - DNA, 201 bp, Homo sapiens
gcaataattgcaccaggaaagggttttctccccagtagtagagctagactgatactactgatcattttggtgttaggcatttaagacacctgacacttcaraaagcctctgtcacccagctctgcattgcgttgacagtaaagcttaaatgcagctttgctttaacaatggagcactcacataaggaccttctctattcca

SEQ ID NO: 13518 - DNA, 201 bp, Homo sapiens
cctattgtatcctgttgtaaagagagcagatacttattgaacttatgcaaataacagtattgccataaaaataggaatattcacaaatagtttctgaattycagagaggtcttgtagggagaaaatgtttccatttttgttcacaagagtatacttaccaaattgctgtaaactatagatagcttaaaagaaaataagttt

SEQ ID NO: 13519 - DNA, 201 bp, Homo sapiens
tctggaaattctttcccagtccaatcgtattatctcgaagttatcagaaatggtacttatcagagacgtttccgtggatctccttgaagatgaagcacttyaggattatagttgcttagaaaaaagcttttagaaaaacatcagaataaagcaattaactgtagacaataagacttaaaatggttgtggttaaagatctga

SEQ ID NO: 13520 - DNA, 201 bp, Homo sapiens
gtaatcttaatttctagtgaaaactagcaagcattgtgaactgtcttctattaacattcaccatttcataatttctagaaacatgtttcctcagcttttcrtgcttattacagacccaattatattctctatgccatacaaaaacaagatgccaaagcatatatactttagacttatgttcagcaattaatgtttcagtat

SEQ ID NO: 13521 - DNA, 201 bp, Homo sapiens
aactgtcttctattaacattcaccatttcataatttctagaaacatgtttcctcagcttttcatgcttattacagacccaattatattctctatgccatamaaaaacaagatgccaaagcatatatactttagacttatgttcagcaattaatgtttcagtattttaatttacttagaaatgatattttatgaatatctat

SEQ ID NO: 13522 - DNA, 201 bp, Homo sapiens
ttaatgtttcagtattttaatttacttagaaatgatattttatgaatatctatgacttaatttaacgtaaaataaccgtaagaggaggctggatatgtggrcaggggccaaatgaagaactgccttctggttgtagattttcttctaaagtcagttagagcccccagagaatgttgaatagagattgacataatcagatcc

SEQ ID NO: 13523 - DNA, 201 bp, Homo sapiens
atttaacgtaaaataaccgtaagaggaggctggatatgtggacaggggccaaatgaagaactgccttctggttgtagattttcttctaaagtcagttagarcccccagagaatgttgaatagagattgacataatcagatccacagaaagaaaagatcatttggtggctagagaggccagtgaggggtggagcacattaga

SEQ ID NO: 13524 - DNA, 201 bp, Homo sapiens
actcagagtgagaactcactcgttatcaagggggcagtgccgagctgttcatgagggatctgcccccaagatctaatacctttcactacctaatctaatamctttcacctcgtctaacattggagatcacatttcaacatgagatttggaggggacaagatccagaccatatcaggtggggtcagaggtcctgctaaaact

SEQ ID NO: 13525 - DNA, 201 bp, Homo sapiens
agaactcactcgttatcaagggggcagtgccgagctgttcatgagggatctgcccccaagatctaatacctttcactacctaatctaatacctttcacctygtctaacattggagatcacatttcaacatgagatttggaggggacaagatccagaccatatcaggtggggtcagaggtcctgctaaaactgtgactatca

SEQ ID NO: 13526 - DNA, 201 bp, Homo sapiens
cggggcacctgacctggaacctgagctcaggagagctgcctggtatatgagcttgtttcttctcagttcctgggctgtggcccagaatggtgccattattytctctgccaatgtttcagcggccagcagccttgtggcccggggcctgatgcaggggccagactctggcctcaaggcttctttccccgcagttcctggatt

SEQ ID NO: 13527 - DNA, 201 bp, Homo sapiens
cagagattcggggccatgaagaacctgtgtgcccttggcagaggctgacctggagactgctggtgggccagagacatagccctgttgccctgcctgctgcmctctgggggctggagcctgtccttgcactctgtccatgaagagctgaaaagcgagggcccatgcgaagcagggggaggagagagtgcttttggtatgatg

SEQ ID NO: 13528 - DNA, 201 bp, Homo sapiens
accagcccagcctgtttagcaaacacctgggccctgaagggcgggccagctgtgtcaggtccccatcaggttggagccagagcccagctggaaggaaacaraggcgtgggagagggaggggctggttggctgcaggttctggctggagcttggcaacctagaggctggaacttccgggtcaaggggcttctccgtgggcct

SEQ ID NO: 13529 - DNA, 201 bp, Homo sapiens
gaggctggaacttccgggtcaaggggcttctccgtgggcctcaggagtgcccttcagtgggaatagaatgggactttttatggccgaaggcctggccggarcaaggggtacacagcacagcagcataggggtggggaagggcaggtcttctctcttcgaggctctgaggagatcagtgatgtggtttcaaatccaggcctc

SEQ ID NO: 13530 - DNA, 201 bp, Homo sapiens
agaccagcctggtgttgcctggttttctgccattagggagcagctagaggtcttccagtagctcctgtgtaaagtgatgaaagaaaagggctgggtgctgmctgctcctggagaaaagcaacacactcccagagtcttaattgcctgcttccagggagctgtggtggtttcccttgggcagggcacacgccccagtggttg

SEQ ID NO: 13531 - DNA, 201 bp, Homo sapiens
ggtggcagggagggggactggttgctgggtgaggtaaacacaagtggcaaagcaggttgagagaggggtgattcagtcttggggatggtgggggaggggcwgtatccagacacctgagtggaggccaccaggaagaaccaggagtctaggacaggtgaggtctgagatgcagagggttcagatggcaaatcatttggacaa

SEQ ID NO: 13532 - DNA, 201 bp, Homo sapiens
ggtgaggtaaacacaagtggcaaagcaggttgagagaggggtgattcagtcttggggatggtgggggaggggctgtatccagacacctgagtggaggccaycaggaagaaccaggagtctaggacaggtgaggtctgagatgcagagggttcagatggcaaatcatttggacaaagtcattggctttggcaagggagaaat

SEQ ID NO: 13533 - DNA, 201 bp, Homo sapiens
agaaccaggagtctaggacaggtgaggtctgagatgcagagggttcagatggcaaatcatttggacaaagtcattggctttggcaagggagaaatgatagstttgttcattgatccctttatccactcatcatttagaagcaagattgagcaacttctttgtgacagtgccttcaacagctttttaaacagaagagtgtca

SEQ ID NO: 13534 - DNA, 201 bp, Homo sapiens
agcctgcatcctggggagaggctcttggggtccctgcatccccctgggccactctggctgaccgaggttcctggtcagactccaagctgcttgtggctgcwgggatcttgaggggttgcctttttaaaatttttttattttttgagacagagtctctctctgtcgcccaggctggagtgcagtggcatgatctcggctcac

SEQ ID NO: 13535 - DNA, 201 bp, Homo sapiens
cctcccaggttcaagcaattctcctgcctcagtctcctgagtagttgggatacaggtgcatgtcaccaaatttggctaatttttatatttttagtagagamggggttttaccctgttggccaggctggtctcaaactcctgacctcaagtgatccgcccacctcggcctcccaaagtgctgggattaccggcatgagccac

SEQ ID NO: 13536 - DNA, 201 bp, Homo sapiens
aaattagtcgagtgtggtggtgggcgcctgtagtcccagctacctgggaagctgaggcaggagagtcccttgaacctgggaggcagagcttgcagtgagcygagatcgcgccactgcactccagcctgagcgacagagcgagactctgtctcaaaaaaaaaaaaagaaagaaagaaaaaagaaacaggctcaacaacatta

SEQ ID NO: 13537 - DNA, 201 bp, Homo sapiens
agagcaggcctgcgtggctgcactcttggccactatctattactgatgcccacctgtgtgtttgcttccagttcttcaaggcctttaccaagaacggctcrggagcagtatttccaggtgggtgcccagctctggttgtcctgttagcatcttcctcccccaacctccctcttcacctgggtttctattggggtggagaaa

SEQ ID NO: 13538 - DNA, 201 bp, Homo sapiens
agatggatggggcttctccaggttgtacctgctgctgtttcttgctaccttccctcaaaatgtttgcgggacgcagcaggatttcacatgctctatccccrggaaggccactgagagtcagaatggcatgaggaggaaaaaggagatcaaatattttgagggaaattggggggaggtggagagaaggtggtcatgcctggg

SEQ ID NO: 13539 - DNA, 201 bp, Homo sapiens
gcgggacgcagcaggatttcacatgctctatccccgggaaggccactgagagtcagaatggcatgaggaggaaaaaggagatcaaatattttgagggaaaytggggggaggtggagagaaggtggtcatgcctggggcatgggggtggcccctggctctctgtatggcagagcatcaggtgcagtggccggtgctctgtat

SEQ ID NO: 13540 - DNA, 201 bp, Homo sapiens
tttgagggaaattggggggaggtggagagaaggtggtcatgcctggggcatgggggtggcccctggctctctgtatggcagagcatcaggtgcagtggccrgtgctctgtatctgtcagccaggcaagcttcccagcttgcctcttttccaggaaaatgaagacagtaaggtgcatggtcttgcccatactttcccaaaga

SEQ ID NO: 13541 - DNA, 201 bp, Homo sapiens
ctgtatggcagagcatcaggtgcagtggccggtgctctgtatctgtcagccaggcaagcttcccagcttgcctcttttccaggaaaatgaagacagtaagktgcatggtcttgcccatactttcccaaagaagagacagctagattaaaaacactaggccccccacttctggatcagaactcaagataggataatgcccac

SEQ ID NO: 13542 - DNA, 201 bp, Homo sapiens
gcgcctgccaccaagcctggctaattttttgtatttttagtagagatggggtttcaccatgttgcccagggtggtctcaaactcctcagctcaggcaatcsgcctgccttggcctcccaaagtactgggattacaggcataagccactgcacccagcccaaagcaatccttttaaagaactttaggaaggaggtagagatg

SEQ ID NO: 13543 - DNA, 201 bp, Homo sapiens
tcaaatgcagcagtttatgtaaagggcctggattgcagctgacacatagtaggtgctttataaggatccattcccctcgcctaatgcagagagctcaccaytctgccattggttcatggacttctccatagaccagttgtgagcttttcccagctgcaaaggtgggacgtgccagtgcacgggagatactccaagtcagtg

SEQ ID NO: 13544 - DNA, 201 bp, Homo sapiens
cagcagtttatgtaaagggcctggattgcagctgacacatagtaggtgctttataaggatccattcccctcgcctaatgcagagagctcaccattctgccrttggttcatggacttctccatagaccagttgtgagcttttcccagctgcaaaggtgggacgtgccagtgcacgggagatactccaagtcagtgcagggag

SEQ ID NO: 13545 - DNA, 201 bp, Homo sapiens
agacggagtttcactcttgttgcccaggctggagtgcaatggcactgtcttggctcgctgcaacctccacctcccaggttcaagcatttctccttcctcascctcccaattagctgggattacaggcatgcaccaccatgcctggctaattttgtattttcagtagagacgtggtttcaccattttggtcaggctggtctc

SEQ ID NO: 13546 - DNA, 201 bp, Homo sapiens
gggcaggcccagaaagtgccagtgatggtggggagagaaggcattgtctcctctctccgagttggtggaggggaaaattgtttgtgacgatgctgcctccmgagccatctgctcaccgagaaacccaggatggtggagtggaatgaagccgtgcgtcccatgccagctcccccggggcagccctcacgctgctgctggacc

SEQ ID NO: 13547 - DNA, 201 bp, Homo sapiens
agggcgagcttatggatgggcagctgccatattgaatctcggggtccttggggaagggagtcacactccgccgttcctgtctgtgggcaccgggctgtccygtgcctttccatgccctgcctggagccagagggccactgggggaattcttgggcccaattgccttaccaggtgaggtttgacatcaggctggtgtcagag

SEQ ID NO: 13548 - DNA, 201 bp, Homo sapiens
acctgctattttctttgtccccagtggggctgtttgcagccggtatgggggaaaagaatgagatacagaaaagtccctgagctgggcagaggcatcacccsctctgtgcctgctgagtctctgccttcagcaagggctgggaatgagcttgagatgaaggtgcctgccctgccagagccagggccctcggggtagggctgg

SEQ ID NO: 13549 - DNA, 201 bp, Homo sapiens
ctcaaatgtttgtctttgctttctttgctgtgattttctcagggtcctcatcccctcggccagcctctttgtggttttatctgatcagcctgctgctgtgyccctctttctcctgccctccgccccttgtgctgtgcacgtgcacacacgcacacacacacacatacacacatatgtcctcctccctggagtccttgtggt

SEQ ID NO: 13550 - DNA, 201 bp, Homo sapiens
gaccccaccccatttagagcgagcaccttccctaccctgtcttctagccttaccaggtgtcccagagcaaaggtagtacagaagtcatatttgtgtcttakttagaatgttttcctggtggttttggaactttgcacaacctcctccccactgccccccgccccccgccccccgccttcttctgcatagcttcctaccatc

SEQ ID NO: 13551 - DNA, 201 bp, Homo sapiens
cggggctttccctgctccctgtgggtcctcttccacttcttgactgtgcaggcagctcggcaaaatgtagaccactcacaggaagcaggtacgtccaggasccgttcaccccactgtgcctccaaccctgctctgttcggccctccaaggggagagggggcagggaagctcccttgaattgccccactggctcccagctgc

SEQ ID NO: 13552 - DNA, 201 bp, Homo sapiens
tattgcacttcccactgaaaaacaatttcctgggggaagttggggaaacacgtttcccctgctgcctcggattgtccacaaactgcaccaccatgttctcyggccacgctgccccacacctgcttttgaagactgaaaggatgcgcatccaattcagtccacactgattgaggaaccaggtttataccaggctgcggcttg

SEQ ID NO: 13553 - DNA, 201 bp, Homo sapiens
cagggggacagagaggcctgcagtgcatcagggctagggccgtggtggagagaaagatgtggggtgaagagagggcaggctcgacgccattgggaaggggyccgaggccttacggggtgagttgaggggtgatgggtgagtagggattccgccaggagaggagcatcccagcagagggagcagcctgtgtggagccccgtg

SEQ ID NO: 13554 - DNA, 201 bp, Homo sapiens
gggggacagagaggcctgcagtgcatcagggctagggccgtggtggagagaaagatgtggggtgaagagagggcaggctcgacgccattgggaaggggccygaggccttacggggtgagttgaggggtgatgggtgagtagggattccgccaggagaggagcatcccagcagagggagcagcctgtgtggagccccgtgaa

SEQ ID NO: 13555 - DNA, 201 bp, Homo sapiens
ggagaaggcagtgtgggacgtctgggaagagagtctcccaggctgtgttggtgtccttgggctgcactcacaaatgtcaggctggggctcagccagtagaygtctgttgtctgagttctggaggctgaagtgcaaggtggaggtgtctgtgctggtttcttcgagcctctccttggctgggcggtggtcgtcttctccttg

SEQ ID NO: 13556 - DNA, 201 bp, Homo sapiens
ttggtgtccttgggctgcactcacaaatgtcaggctggggctcagccagtagacgtctgttgtctgagttctggaggctgaagtgcaaggtggaggtgtckgtgctggtttcttcgagcctctccttggctgggcggtggtcgtcttctccttgtgtctccgtgcagttgtccctctcccaatccatgtccaaatttcctc

SEQ ID NO: 13557 - DNA, 201 bp, Homo sapiens
ggacaagcctggtgtgtgggcagcactgaaagaaggctgctgtggccggagggagggaggtgaggctgcagagacaggccgggggcggaggtgagcgctcrtgggctcagaggccttggcgagggcagggtttggaggttggtgttggcattttgagaagccactggagaggctaacggaagtgacagttggttaacactt

SEQ ID NO: 13558 - DNA, 201 bp, Homo sapiens
agttggttaacactttagaaaggtggaggatgggctactgcaggcagggggaggcagggcagctgaggagcaagctgcatgctcgcccagcagtggtggtygggcctggactagggttgtcagtgtgcccctggaggaagtggtcagatttggggatatgttaaaggcagagctgagggacttactgatagattggaggaa

SEQ ID NO: 13559 - DNA, 201 bp, Homo sapiens
atggccttgttggattcggctgaagagagaccaggaggcaagattctggagataatgagcaggaactggggcatgactgggttagagggaacttctttatsatcatccttttccccagttggaatgatcccttatcaggggataaatggatgacgcagtaaagaaaaaacactaacgggagtgaaatcctggaggtgagga

SEQ ID NO: 13560 - DNA, 201 bp, Homo sapiens
tcgggagggagcggtgcacgtggctgtgacagcctcccgggggggggagaccagggcggagccgaggttaaaggagctgaatggagcaggtggtggtgcargcgcctgcacttggtcgtggtctcctggggcctcctatcgaactttgaaaggaagacatgtgcctgtcttctccttcccccaccccgcccctgccaccaa

SEQ ID NO: 13561 - DNA, 201 bp, Homo sapiens
cctgggcaacactgcgtgaggggctggtggccgtggctcaccctctgggactcatccagaggctgcctagagggctgggcccacctggggtaccaacagcstgcagccccagcagcatcctgactcttccaagtacccctcaggtctccccccaactatcccttggagcccacccctaccccagagggctgctgctgggta

SEQ ID NO: 13562 - DNA, 201 bp, Homo sapiens; identical to SEQ ID NO: 1512

SEQ ID NO: 13563 - DNA, 201 bp, Homo sapiens; identical to SEQ ID NO: 1515

SEQ ID NO: 13564 - DNA, 201 bp, Homo sapiens; identical to SEQ ID NO: 1517

SEQ ID NO: 13565 - DNA, 201 bp, Homo sapiens
tattctcccaaatggtgagaggtagatccaggacttgaccccagatcccacccactcaaccctggagctgcagtctctaccccttctaacacatgtgattytgtttcatgtcctgttccatcggtagagttacacactttcctgagactttatatggtggtgctgctgggtgccagcccttcttccctccaacagtggcag

SEQ ID NO: 13566 - DNA, 201 bp, Homo sapiens
ttgcgggtccctgctaaattcctctccctcttcctgggattcccatccatgtattgccagctacatgtagagtggagaggagaggtttttcctgcagggcyttccagagaaaggattcttggccagaggaaatcacagcctataagatcaatatcctgatagaatcccgggccaggtgtgagaggggagagctcactcaca

SEQ ID NO: 13567 - DNA, 201 bp, Homo sapiens
ctatcatttcaggcaccttactaagtactcggcatacattgtctcatagtttcctttccacaatttaaagattcctgtggtgtcacacatccacctaatcyaggtagtgggtatttggcgggcaggagtggtatagtgatagtgatttgttcctgacttgctgcctctgaatggagttacttcctgactctggtgctaggt

SEQ ID NO: 13568 - DNA, 201 bp, Homo sapiens
tttgggtaaatctgtgcctctgtcttcatggaagtccagacccacttaacactcggaggctgcatgtttcttgttaagagttgtttgccatccagcacctsaacggttgtcagagctagaaggggcattagagatcattcatcctggccctcgctgatccaggaggaagcagaggtccagagagacatgtggagctcacgg

SEQ ID NO: 13569 - DNA, 201 bp, Homo sapiens
gattttcttctaaagtcagttagagcccccagagaatgttgaatagagattgacataatcagatccacagaaagaaaagatcatttggtggctagagaggscagtgaggggtggagcacattagaacctcaccaggagagaaataatatgttgatgtttctctggaagccctgccatgagaacctgtactagctcatggga

SEQ ID NO: 13570 - DNA, 201 bp, Homo sapiens
acccctgggttttttgtcctttcagcctggaggccggccctgtatctcgccgccctggactgtgctgaggagaccaacagtgcagtctgcagagacttcarcatccctggcttcccgactgtgagggtgtgtgactgacaggaggggaaggcaggctgggcctgctttgtttccctttataagggaaagggaccatgtggg

SEQ ID NO: 13571 - DNA, 201 bp, Homo sapiens
gggtgcccagcaccgcactcaccactgcaggcgtggccaggagcgtgagatccccagagcccatggccagtgagaggcggccagggataggtacccagggwatgccacaggagtttgctgggctcacggagctctttcactggtcagagaggagtgtgtgtaggagaggacttctacttggtgttgaaggacagatggggt

SEQ ID NO: 13572 - DNA, 201 bp, Homo sapiens
ccagtgagaggcggccagggataggtacccagggaatgccacaggagtttgctgggctcacggagctctttcactggtcagagaggagtgtgtgtaggagrggacttctacttggtgttgaaggacagatggggtttggctgggagagaggaggaatgtgggcgggccttataggcaggcgagaaggtgagagccaaggcc

SEQ ID NO: 13573 - DNA, 201 bp, Homo sapiens
gggagtgaaggtggccagtgtgctgtggaagcagctctgctctcctgacactccgctcacgcctgttttcatttacagtggctggtgctgacgtgcagacrctgcgggagaggctcattgacgccctggagtcccatcatgacacgtggcccccagcctgtcccccactggagcctgccaagtactttgggctggggcagg

SEQ ID NO: 13574 - DNA, 201 bp, Homo sapiens
ctcagctcaggcaatcggcctgccttggcctcccaaagtactgggattacaggcataagccactgcacccagcccaaagcaatccttttaaagaactttargaaggaggtagagatgtgtgatgaaaggtgagctgcctcttctgaagtctgagggtgggagtggggaaaggggtactggcccccatgtaggttgtgctct

SEQ ID NO: 13575 - DNA, 201 bp, Homo sapiens
cataagccactgcacccagcccaaagcaatccttttaaagaactttaggaaggaggtagagatgtgtgatgaaaggtgagctgcctcttctgaagtctgarggtgggagtggggaaaggggtactggcccccatgtaggttgtgctcttctgccagcctagggaagacccagggaagaggtctgagaggctggccacctga

SEQ ID NO: 13576 - DNA, 201 bp, Homo sapiens
aggaggtgcgatgccaccaaggacagggaggcactcgctttccgggcaggcccagaaagtgccagtgatggtggggagagaaggcattgtctcctctctcsgagttggtggaggggaaaattgtttgtgacgatgctgcctcccgagccatctgctcaccgagaaacccaggatggtggagtggaatgaagccgtgcgtcc

SEQ ID NO: 13577 - DNA, 201 bp, Homo sapiens
cccactgccccccgccccccgccccccgccttcttctgcatagcttcctaccatctgcaggacggggaacttggggaattgcttttcactctccagcttcygcttgttcctccccacagtatttccctggccggcccttagtccagaacttcctgcactccgtgaatgaatggctcaagaggcagaagagaaataaaattc

SEQ ID NO: 13578 - DNA, 201 bp, Homo sapiens
acggctgtggggctggcagcctgaagggctggtgcgtggcatctcctctgccctgtagccaaggccaaggaggtcctcccagccatccgaggctacgtgcrctacttcttcggctgccgagactgcgctagccacttcgagcagatggctgctgcctccatgcaccgggtggggagtcccaacgccgctgtcctctggctc

SEQ ID NO: 13579 - DNA, 201 bp, Homo sapiens; identical to SEQ ID NO: 1501

SEQ ID NO: 13580 - DNA, 201 bp, Homo sapiens; identical to SEQ ID NO: 1502

SEQ ID NO: 13581 - DNA, 201 bp, Homo sapiens; identical to SEQ ID NO: 1503

SEQ ID NO: 13582 - DNA, 201 bp, Homo sapiens; identical to SEQ ID NO: 1504

SEQ ID NO: 13583 - DNA, 201 bp, Homo sapiens; identical to SEQ ID NO: 1505

SEQ ID NO: 13584 - DNA, 201 bp, Homo sapiens; identical to SEQ ID NO: 1506

SEQ ID NO: 13585 - DNA, 201 bp, Homo sapiens; identical to SEQ ID NO: 1507

SEQ ID NO: 13586 - DNA, 201 bp, Homo sapiens; identical to SEQ ID NO: 1508

SEQ ID NO: 13587 - DNA, 201 bp, Homo sapiens; identical to SEQ ID NO: 1509

SEQ ID NO: 13588 - DNA, 201 bp, Homo sapiens
gagtgtctcagtagcctcgccctagtcctggctttcacttaaatatgttttcgaatgtttgtaataaaatatttcttttggaaggcaaaaatagcaaggaraataaataggattaaaggatactaaagcccattcaataaaatttgtaggaggccactgatttggcctaggctcctatgatgtaaccaacagaccaaacca

SEQ ID NO: 13589 - DNA, 201 bp, Homo sapiens
ataaagatctctccatcctccgtatttatgagagtgcaaggggttaaccctgtcatttctgaccttcttcgccagtttgcaccagggagtcagtgatcttsgttgggtcctaacaataatcaataaatgactattgattgagctctctatgcgcacatctcatttaatcctcataatgttagtggaaggtagatattctcc

SEQ ID NO: 13590 - DNA, 201 bp, Homo sapiens
accctgtcatttctgaccttcttcgccagtttgcaccagggagtcagtgatcttcgttgggtcctaacaataatcaataaatgactattgattgagctctytatgcgcacatctcatttaatcctcataatgttagtggaaggtagatattctccccatttagcagatgaagaaacagtactttgaaaaggttaagcaact

SEQ ID NO: 13591 - DNA, 100 bp, Homo sapiens
gcgcggtgctgggctcccgcagcgcctgggccgtggagttcttcgcctcstggtgcggccactgcatcgccttcgccccgacgtggaaggcgctggccga

SEQ ID NO: 13592 - DNA, 201 bp, Homo sapiens; identical to SEQ ID NO: 1499

SEQ ID NO: 13593 - DNA, 201 bp, Homo sapiens
ctgcaaaggaaaacagcagtggtacttcatcactcatccattcgataaatattggttagtaattacatgctaggtactgtgctgcatagaaatggccctcraggaggaaagtgtatgaactgctgcccacaggatccatggatgcttctgaggggtgtgggagggtaacaggggagggagccagtgtccagctcctagagc

SEQ ID NO: 13594 - DNA, 201 bp, Homo sapiens
tatttgttgagtgataagcattgtttgcattgcagttggggaaatgagctactcatagaaggaaaattggcaactgttacaaagctgtgtttgaaaaaggycaaaggagtggttcagccatttcttatgggaacccaggggaggggaaagtcacagagggctaatctgatcaccagaggccttcatgccagtagttattta

SEQ ID NO: 13595 - DNA, 201 bp, Homo sapiens
ttcctgcatctgtctcgtggaggtgagggtaacactccttccccaggcgtaacgtgttcttaggagctctgataccttctgaaattgtgttcttctgagaygtcgtaaggagtaagttctagggtggagtattagggtgtttttgcattgataaaagtaagtacctgaggctaggtaatttataaagaaaagaggtttaat

SEQ ID NO: 13596 - DNA, 201 bp, Homo sapiens
atgagaacacaaaggttcggagcagttgatgcgttgcccaaggtcacacagcaagagcaaagcagaaccagtccttgaacgaggtctgccagagcccgggrcctgttctcagctgccagcttgggataaggccaaacagctctatcccaaggagggagaaggaaaccagtgtttggctgttggaggcagaagtccaaggta

SEQ ID NO: 13597 - DNA, 201 bp, Homo sapiens
ccaaagaagagacagctagattaaaaacactaggccccccacttctggatcagaactcaagataggataatgcccacctcggaggactcttgccaagaagraacaaatccatgtaccagcaggagctgctagagggagcccagccttgtacacagtggaggccccaggtgctaagaaggcctcacaaggccgctgttggtg

SEQ ID NO: 13598 - DNA, 201 bp, Homo sapiens
gggaagacccagggaagaggtctgagaggctggccacctgatgccaccctaaaggctcaacacctcttttcctccaccccagcggggtgcactctggcccwcacctgtctagcatatccatttggactgtcactggctgggctccagcatcaataccatgtttttgtttgttttgttttgttttggatatgttttgttttg

SEQ ID NO: 13599 - DNA, 201 bp, Homo sapiens
tgaaatatttgggagggagggaacattagcgacgccctagccccaccggaggaaatggggtcctttacccagatgccggtctgtctcatgtggggcatccrtgagccagctccccagcgcttccagctgcagtgccctgtctagaaagcagggatgattacgtttctccgtagtattgttgggaaggtcaaatgcagcagt

SEQ ID NO: 13600 - DNA, 201 bp, Homo sapiens
tgttgttattattattttgcaagtaaggaaatttggtcagggaaaggtttggtgcagtggggccaggattccaatgcaggcaactgtagtgtacggtgccrcatctcttagtctcctgagaatagctgctatttcagtgtttctctgaagataaatgaggcaatctgtgtggacactacataatacctatgcaatacaggt

SEQ ID NO: 13601 - DNA, 201 bp, Homo sapiens
aggcaactgtagtgtacggtgccgcatctcttagtctcctgagaatagctgctatttcagtgtttctctgaagataaatgaggcaatctgtgtggacactrcataatacctatgcaatacaggttagctagtgctttctctttatttctttctaaaaaaaataatgatgactgatgtatatttttctgattcggagtctag

SEQ ID NO: 13602 - DNA, 201 bp, Homo sapiens
aaaggctagggggcgccacctgctccatggtgaagagtgagacgtcagtaacagaagtccgtgcctgccatttgcagatggcctgtccgattatgctcagmacttctcttcccatttctaatgtggggacattgtcatctcaacaaggcctcttgttgccttcagagagccccacgttaagaaacgttttcagatcttctt

SEQ ID NO: 13603 - DNA, 201 bp, Homo sapiens
actgcacatactgggctcagagttagcctgctgtttagaagtttacccaattccaaaggtttattttgtttgtatcctacccatgaaatttgttaccatakgtatttgaacgcaataaaatcacagttctttaaacatctgtgactcaagcttccataaggaagactgctcttgcccccaacaattgatatttcaaacaaa

SEQ ID NO: 13604 - DNA, 201 bp, Homo sapiens
aggtgccctggctgtgggtgagagggaatatgcactcaggaggtatcccgtgccctggaggactcctccctgtcggaaaaaagaaagaaaccaaaaagacygtaaaaagatttagagaattctggaggctctttgtcattgttgctacctgttttttgaaaaatcccatatcaaactccctggacttcttagggggtaatg

SEQ ID NO: 13605 - DNA, 201 bp, Homo sapiens
gaaaactttttaaaaatattactaaggattttcacaatgctgcactgggctagaaactgaagctaaaacagatacgtggtccctgctgctatggggcttcygttctagaggcaaggacaggttgtgatgagggttctgaaggatagagaccaagcagggagggtgttgaggaggcttctgcgagacctgaaggatgggaag

SEQ ID NO: 13606 - DNA, 201 bp, Homo sapiens
ctgaggcccaggaaagtcaactgagttgcccaagctcacaaactagctcacagtcaaactgaggtcagaacccaggtctcaagagacaggggaagaggcayccaactttcctggcccctgccatcagaaccctgagcctggaccccagcatgatgggcctggggccagcatggagcctccggcccttccatgagggctgcg

SEQ ID NO: 13607 - DNA, 201 bp, Homo sapiens
tggcctgggtgctatgtggagcaggtgggatgccaaggccactcctgctatggggcagctggggctggggagggatggcagtctccctgcatgtttccctygacctctttagctgcagcgccttgctgggctcctgggttggactccctctctgtgcccctgctccaggcacccattggctccatcctcctggttgtgctc

SEQ ID NO: 13608 - DNA, 201 bp, Homo sapiens
aaatgaagaactgccttctggttgtagattttcttctaaagtcagttagagcccccagagaatgttgaatagagattgacataatcagatccacagaaagraaagatcatttggtggctagagagggcagtgaggggtggagcacattagaacctcaccaggagagaaataatatgttgatgtttctctggaagccctgcc

SEQ ID NO: 13609 - DNA, 201 bp, Homo sapiens
tacacagtggaggccccaggtgctaagaaggcctcacaaggccgctgttggtgcgcagaggctctcttaaaagtttgtgtgcaggtgctctcagagacatrgccctgctgagagattgtgtttccaagtgtcagttggggttgaatccaactcacaatgactcctttgtcatctttcccaattttccatcctccagagggc

SEQ ID NO: 13610 - DNA, 201 bp, Homo sapiens
agactgatgggaggtgagctcttccttcttcatcaccccaatatgctcttgcaagatgctcataaacggacccatgtgattctaccaataacacaggaaaragatgtgccattttcaaatgattcctagagttcagcggtgtgtatttttaaaaactaaatcttcttctttaagtcaaagtttacacattgcagtaccacc

SEQ ID NO: 13611 - DNA, 201 bp, Homo sapiens
gctccctccacccaactcaaaacaggagctcgagcctgcctgtatttgagactggagctgcctgtatgaggactggatcaactgctagtcacgttatatcmaaatctgcattatcattgggcacattttcacagaattttactgaattattccttaattgtttaatggttgggaatagtttgggaattaccttccatcaac

SEQ ID NO: 13612 - DNA, 201 bp, Homo sapiens
aaaataaaaatatgaaatatgagtgtgaactctgagtagagtatgaaacaccacagaaagtcttagaaatagctctggagtggctctcccaggacagtttscagttgctgaatagtcttttggcactgatgttctacttcttcacattcatctaaaaaaaaaaaaaaaaaatcaaaattaaaatctgagtcagtccgcctg

SEQ ID NO: 13613 - DNA, 201 bp, Homo sapiens; identical to SEQ ID NO: 13612

SEQ ID NO: 13614 - DNA, 201 bp, Homo sapiens
ggttttttggtttttcattgtttgagttttgggcatagatgactgtgaagggcgaacactgccgatggatcaatgaatttgtagtatgtgcaccacttccracttacgggatacccagctttgacggctttggacaaacacactgaggccaagatgtgctgagcttatcaggatcaggatcaccaagcagctgtaaaaacc

SEQ ID NO: 13615 - DNA, 201 bp, Homo sapiens
ctgctggtcctttactggtggctttcctttctgagcactcatggggcccctgtgtcttccctcatatagattccaggtggatctgcagaatggcagcagcrtgaaacctcgagccgatgtggcctttcatttcaatcctcgtttcaaaagggccggctgcattgtttgcaatactttgataaatgaaaaatggggacggga

SEQ ID NO: 13616 - DNA, 201 bp, Homo sapiens
caaacaaacagaatccaaagtgctatcatgaaccctctgagaggggctgactcagcagcccagggagcttgaagaaggctccacagaggaggctgtgcctsaaggcgatttcggtttaggagccaccaatttataaccacttttctgtggcccgtcttattttatttcttatttcttgacaatcagaagtaccttgggtag

SEQ ID NO: 13617 - DNA, 201 bp, Homo sapiens
ccatcatcccccatgaaaactattgttatcatttttgtctgatttctttagtgtttctctttttctttttttaatttttaatttttttgagtatgtagtakgtatatctatttatggggtatatggcatattttgatacaggatacagtgtgtattagcaaggttttctttttaatgtttatatttatttagttgagatca

SEQ ID NO: 13618 - DNA, 201 bp, Homo sapiens
tgaaacatataattaaaaatatttttctggctatagaaatatcgatgcttattatagacatctgcaaagtatgaaaatatatgaagaaaaaaattaaaatsccatcatcccccatgaaaactattgttatcatttttgtctgatttctttagtgtttctctttttctttttttaatttttaatttttttgagtatgtagta

SEQ ID NO: 13619 - DNA, 201 bp, Homo sapiens
aaaaaaaaaaaaaaagtgatgggaatagattgttttgtctcaaaaagctctttccaacactaaaatgaaacatataattaaaaatatttttctggctataraaatatcgatgcttattatagacatctgcaaagtatgaaaatatatgaagaaaaaaattaaaatcccatcatcccccatgaaaactattgttatcatttt

SEQ ID NO: 13620 - DNA, 201 bp, Homo sapiens
cttggatggctgaggcaggagaatcgcttgaacccgggaggcagaggttgcagtgagctgagatcacgccactgcactctagcctgggggacagagtgagwctctgtctcaaaaaaaaaaaaaaaaaaaaaaaagtgatgggaatagattgttttgtctcaaaaagctctttccaacactaaaatgaaacatataattaaa

SEQ ID NO: 13621 - DNA, 201 bp, Homo sapiens
tattgtatttttagtagaaacagggtttcaccatattggccaggctggtctcaaactcctgacctcaagtgatccacctgcctcggcttcccaaagtgctsggattacaggagtgagccaacgtgcctggtcaaaatttttgttttcgtaattttaagtatgtgtgtagtaagtctcaatggaaatgtaattcttatggca

SEQ ID NO: 13622 - DNA, 201 bp, Homo sapiens
gtgaggttacagtttttgaaaatgggacagcaataagaatcctgggagcaggggtgggataagtggtccatttaaatcaagtcctaactcagtatgtggargttgtgtatgttttttgtttacttggagattgtaatttgcccctttttataacgtgggcaatcagtataaatggcaaagccagtagagtgtcaaattatg

SEQ ID NO: 13623 - DNA, 201 bp, Homo sapiens
catttgtaagaaattcttttcttcaggagtcctggggagaagaagagagaaatattacctctttcccatttagtcctgggatgtactttgaggtgaggttmcagtttttgaaaatgggacagcaataagaatcctgggagcaggggtgggataagtggtccatttaaatcaagtcctaactcagtatgtggaagttgtgta

SEQ ID NO: 13624 - DNA, 201 bp, Homo sapiens
aaaggtcagtatccttcggtaccagtcacagtgcagatacttccgtgcctgttaccgccttccacccgtgaacggtcctgtgagctggaagaagggctagygtcagaatcttcatttccaaagtgagatgattcaagcaggaggtggttagattgtgaacagccagtgggcagcagagccgactaaggccgtgttctgacc

SEQ ID NO: 13625 - DNA, 201 bp, Homo sapiens
aactgtcgtcgttaaaggagaagtgaatgcaaatgccaaaaggtcagtatccttcggtaccagtcacagtgcagatacttccgtgcctgttaccgccttcyacccgtgaacggtcctgtgagctggaagaagggctagcgtcagaatcttcatttccaaagtgagatgattcaagcaggaggtggttagattgtgaacagc

SEQ ID NO: 13626 - DNA, 201 bp, Homo sapiens
cagaagtaccttgggtaggttttaccatgcacatcgtaatttgagtgagcttagtgtgaggcttaacggtgtgtgggctgtacatcctggtcagatgctcyagatggaggcagatggttgtgatgcaggagaggcagccacatagcacaggtccccagccagtggactgggaagacagtgtagtcatctctggggaagggg

SEQ ID NO: 13627 - DNA, 201 bp, Homo sapiens
tccttttttaccttacaatttagtcttaaaacacaacacagtcaagtctttcttttgtaacctgtgagataccttctagcctttgtgctgtttttcttctytttttgctgcctgccttcctgactgagagtggatttcctcactaaggctctgccctctgatttttcactctcttttcttttttggttttactagtgaaat

SEQ ID NO: 13628 - DNA, 201 bp, Homo sapiens
gtttatccttttctgcttagtattctaagtactccttttttaccttacaatttagtcttaaaacacaacacagtcaagtctttcttttgtaacctgtgagrtaccttctagcctttgtgctgtttttcttctctttttgctgcctgccttcctgactgagagtggatttcctcactaaggctctgccctctgatttttcac

SEQ ID NO: 13629 - DNA, 201 bp, Homo sapiens
gcaaggaaagaggacaatatagatgaaaaagaaattgatcctaccagaagtgatccttttatctgcataactctcaggcagttgtggcaaataattggcartatctattgttctgaaactggttttcgcaacttttattgggaacaccatcccctctcctgcatgatcagtttctcctctccacggatcattcacatgagt

SEQ ID NO: 13630 - DNA, 201 bp, Homo sapiens
atttctcatttcataattgcccttctcctgctttaccaaaatctttcaccccccatcatatatatatatccccatacatattctatatatacataccctayatatgcatgcacacacatcatatatatgtatgcatatatgatatatacatatatgctatgtaaacatatatagtgtgtatatacatgtgtgtatgtgtat

SEQ ID NO: 13631 - DNA, 201 bp, Homo sapiens
ggtgggttttattactctccatttctagataaaggatctcacctaatattacatgggccagtggtcttccagttggggtatgcacaaccctaggggtaggwgaggaccctgcctggggtcttcaggtggggaccatcaacctccatttgtactcttttctgaacattggtctgagacagaaagtccctgcaattaaggcat

SEQ ID NO: 13632 - DNA, 201 bp, Homo sapiens
ctttttttttgatggagtcttgcactatcgccaggctggaatgcagtggtgcgatcttggctcactgcaacctccgcctccgggttcaagcaattctcctrcctcagcctcctgagtagctgagactacaggtgtgtgccaccacgccagctaatttttttatttttctagagacggggttttaccatgttggccaggatg

SEQ ID NO: 13633 - DNA, 201 bp, Homo sapiens
gaatctcccaaactccattcacctctcccttctctggccttttgagcccgtgtctgtatcattctttttcacagtttttaacagttgtgctttggctttaygtgtttattttgcctccacaatgggattttaagctccctgagtcagagactatattgtatgctgctcgcgttttctgcctataacctaacgtggtacctg

SEQ ID NO: 13634 - DNA, 201 bp, Homo sapiens
tctctggccttttgagcccgtgtctgtatcattctttttcacagtttttaacagttgtgctttggctttacgtgtttattttgcctccacaatgggatttwaagctccctgagtcagagactatattgtatgctgctcgcgttttctgcctataacctaacgtggtacctggcatttgagagggagggaggaggagcctcg

SEQ ID NO: 13635 - DNA, 201 bp, Homo sapiens
cttttgagcccgtgtctgtatcattctttttcacagtttttaacagttgtgctttggctttacgtgtttattttgcctccacaatgggattttaagctccytgagtcagagactatattgtatgctgctcgcgttttctgcctataacctaacgtggtacctggcatttgagagggagggaggaggagcctcgtagcgtgc

SEQ ID NO: 13636 - DNA, 201 bp, Homo sapiens
attttaagctccctgagtcagagactatattgtatgctgctcgcgttttctgcctataacctaacgtggtacctggcatttgagagggagggaggaggagsctcgtagcgtgccgaggacctgcagaagctactttctcgtcatcttactgtagtctgttgaggtagagactgttcctacttcagaataagaaaaccgaat

SEQ ID NO: 13637 - DNA, 201 bp, Homo sapiens
acctggcatttgagagggagggaggaggagcctcgtagcgtgccgaggacctgcagaagctactttctcgtcatcttactgtagtctgttgaggtagagaytgttcctacttcagaataagaaaaccgaattcaaatatgttgggtaacttgtccatattaatttatttagcaaatacaacagattttgagtgtctgccac

SEQ ID NO: 13638 - DNA, 201 bp, Homo sapiens
gaggcgcacacaagcacacgcacatatacttatgactgcctgtttgtctggggagagacagttcctggtgcttaatcaaatcaggaactcaaaagaagttyggaagcactgctagtgttttgggtgctttcggttaccatttggtcatgtgtgtggagacctgtgggaacaggtataaaactggacgcaaggaaacattta

SEQ ID NO: 13639 - DNA, 201 bp, Homo sapiens
gcacacgcacatatacttatgactgcctgtttgtctggggagagacagttcctggtgcttaatcaaatcaggaactcaaaagaagtttggaagcactgctrgtgttttgggtgctttcggttaccatttggtcatgtgtgtggagacctgtgggaacaggtataaaactggacgcaaggaaacatttaaatttggataata

SEQ ID NO: 13640 - DNA, 201 bp, Homo sapiens
ctggggagagacagttcctggtgcttaatcaaatcaggaactcaaaagaagtttggaagcactgctagtgttttgggtgctttcggttaccatttggtcaygtgtgtggagacctgtgggaacaggtataaaactggacgcaaggaaacatttaaatttggataataagttaatttattaactgtttttttttggtggcgg

SEQ ID NO: 13641 - DNA, 201 bp, Homo sapiens
tcaggaactcaaaagaagtttggaagcactgctagtgttttgggtgctttcggttaccatttggtcatgtgtgtggagacctgtgggaacaggtataaaaytggacgcaaggaaacatttaaatttggataataagttaatttattaactgtttttttttggtggcggggggggctctgtcttctgtatctctctaggtgg

SEQ ID NO: 13642 - DNA, 201 bp, Homo sapiens
agacaggggttcaccatgttggccaggctggtctggaactcctgacctcaagtgatccgcccacttcgccctcccagtgctgggattacaggtgtgagtcrccacgcccagcccaggcaacattttttagggcccctcttgtcatgtgatttagaaaatttctgctttaacaactttttccacagacgtccagccttctga

SEQ ID NO: 13643 - DNA, 201 bp, Homo sapiens
gaatacctgcttgagaggatcccaggctcctgcagcctgaagtagtcattcagtttagcgttaaaccttccatttctgtccaaccacatctcagcctcaaygctgattttaaagggttttttttttcgtatttttattttgcaagtaacgaattagtggaatgctgactgggtttaaaatttcaacttcacctgcattccc

SEQ ID NO: 13644 - DNA, 201 bp, Homo sapiens
aaagctgggaaggatgtggaaggctgaaggttggcttttctagatttagggcatgatttgaacaagtccttagaggtgggaagggcagcacagggttgttrgcttggcaagagtcaaggcgcaaagggtgacttggggttcactggagggaaacagaggtgagtgctctagaaggaagttgagccttgtggtgggtgacag

SEQ ID NO: 13645 - DNA, 201 bp, Homo sapiens
aaggctgaaggttggcttttctagatttagggcatgatttgaacaagtccttagaggtgggaagggcagcacagggttgttagcttggcaagagtcaaggygcaaagggtgacttggggttcactggagggaaacagaggtgagtgctctagaaggaagttgagccttgtggtgggtgacaggaaaccaatgatgtaactt

SEQ ID NO: 13646 - DNA, 201 bp, Homo sapiens
tgaacaagtccttagaggtgggaagggcagcacagggttgttagcttggcaagagtcaaggcgcaaagggtgacttggggttcactggagggaaacagagrtgagtgctctagaaggaagttgagccttgtggtgggtgacaggaaaccaatgatgtaacttgtttttgacctatctgggccccaagtttggatctgctat

SEQ ID NO: 13647 - DNA, 201 bp, Homo sapiens
gggccccaagtttggatctgctatattaatataaaaaaggataataatgatacattcaaataatgctgaaaaatactaagatgaaaatacctccaacttcrtaattcaaaccataccattaggattaggtgaaccacattccaggcatttttttgcagagacagtgaaagggatggctggctgaaggaatgaatagatgaa

SEQ ID NO: 13648 - DNA, 201 bp, Homo sapiens
atgatacattcaaataatgctgaaaaatactaagatgaaaatacctccaacttcataattcaaaccataccattaggattaggtgaaccacattccaggcrtttttttgcagagacagtgaaagggatggctggctgaaggaatgaatagatgaatgttatatgcttttgaacaatcgtcttttccatttaattttctaat

SEQ ID NO: 13649 - DNA, 201 bp, Homo sapiens
aaaatactaagatgaaaatacctccaacttcataattcaaaccataccattaggattaggtgaaccacattccaggcatttttttgcagagacagtgaaarggatggctggctgaaggaatgaatagatgaatgttatatgcttttgaacaatcgtcttttccatttaattttctaattcaggagcagtaattatccttgt

SEQ ID NO: 13650 - DNA, 201 bp, Homo sapiens
ttgttctgttttcttctaggcaaaggatgtgccttcttttcatttgcagtagtctgctcacccggaagcatgtcatttctttgccacttgcttgtaattcrctggctttgcacttgctctgatacagtacaggtaactaattgactccctctgctgccaacttggttttccttctgagctatagcatcaggctgtgtgttt

SEQ ID NO: 13651 - DNA, 201 bp, Homo sapiens
tcttggccagctgttatcagagtgcaggacttgggctgaaatttcctccccttcctgattttccttgacagtcctttccactgctcctatcaaaagaatgraaaccctcaacttgctgctttgcagattcaggttttgtgcttcattctggcctctcggggtggggccgggttagcagcaaggctgagctgcccctctttc

SEQ ID NO: 13652 - DNA, 201 bp, Homo sapiens; identical to SEQ ID NO: 1584

SEQ ID NO: 13653 - DNA, 201 bp, Homo sapiens; identical to SEQ ID NO: 1584

SEQ ID NO: 13654 - DNA, 201 bp, Homo sapiens; identical to SEQ ID NO: 1586

SEQ ID NO: 13655 - DNA, 201 bp, Homo sapiens; identical to SEQ ID NO: 1586

SEQ ID NO: 13656 - DNA, 201 bp, Homo sapiens; identical to SEQ ID NO: 1587

SEQ ID NO: 13657 - DNA, 201 bp, Homo sapiens; identical to SEQ ID NO: 1587

SEQ ID NO: 13658 - DNA, 201 bp, Homo sapiens
ataaaagagcaaagaaataaaaagtagtgttactgtatttattatcttaagagctgtactgacttgagacaagctctaactttttaaacattagttcacaygcgtttattcacttcattatgttcattaagctttcatcttagaataccagtttcaccatttgggagctgtttgtaatatgtgcaaccttataaatagtgt

SEQ ID NO: 13659 - DNA, 201 bp, Homo sapiens
aatagtgttttccaaactgtgtcccaggactgcaaatctttaatgtgaaatgtctttttataatctcttcctttaaaaaaaaccaataaaataaaatgccrcatgcaaactcaagtgtgtcaccagattttacttcattggcgctcgccagcccgccaggctggcaataaagtgcctccagccacctctggcaggtctcct

SEQ ID NO: 13660 - DNA, 201 bp, Homo sapiens
cttcattggcgctcgccagcccgccaggctggcaataaagtgcctccagccacctctggcaggtctcctcacccacagcccctgactggtcaccactatarttgtatgaggggccaggacagtcgcttgggataaactcccatctcagcactgaataaaaaacattctgtgtcacaatatcctagttttggggctttaaaa

SEQ ID NO: 13661 - DNA, 201 bp, Homo sapiens
cgccaggctggcaataaagtgcctccagccacctctggcaggtctcctcacccacagcccctgactggtcaccactataattgtatgaggggccaggacartcgcttgggataaactcccatctcagcactgaataaaaaacattctgtgtcacaatatcctagttttggggctttaaaaacgtctaggtgttcctcacat

SEQ ID NO: 13662 - DNA, 201 bp, Homo sapiens
ctattaataaaattctgctttggtctgttatagccagtaaagttctaatacaatcattagtttgagaaatggtgactcattgctaaaacagtttgaaattygtaacacttgggtgtcaaattttgacttccactcaacctacccatgttttatttccactgccaccacttactcaacaagatcataagcctagtatctata

SEQ ID NO: 13663 - DNA, 201 bp, Homo sapiens
cctagtatctataaacaacagaatgtattgctctaactcaaaagactatagtgtggataaattcaatgcatttctctctggagcacaatgacatttcaatrgcacttaaaaaagaaggaattacttcaaatctttgttatttaaaagtatttagaaagtattttagtacttctgcccaacgcaccattggggtggggatag

SEQ ID NO: 13664 - DNA, 201 bp, Homo sapiens
tacttgtcacgcagttcctaaccttaggcgaggagtctctcgtctttagcagaatctggtagttcagtggtttccaaagagagtcatccgccatggccacygaaaactgtgcgatgcatggtatcaggtgctttgtcacccgttcctggaatttctcttctcccccaagcctgttttccagctaggaagagtaagacaaag

SEQ ID NO: 13665 - DNA, 201 bp, Homo sapiens
ctggaatttctcttctcccccaagcctgttttccagctaggaagagtaagacaaagactttgaacaacaagtctcatttctttcttctgtttgaaaaaatrtccaacatacaaatattttactatctttcatgatattagcaggttcaaaaaccaggcattattctaatactctctagggcaaatgtattgccttctagaa

SEQ ID NO: 13666 - DNA, 201 bp, Homo sapiens
agaactcaaatggaatctcataccctttatcatcgcccctttctctccagcagaacatctcagaggagctctttgctccagaggacagccatgctctgacrcgttctcagtgaggcccagttaaaacaaatgaatacattaaccatgacagcttatatcatgtctgtcttttgagcagtttaaaaaataaaaaataaaaaa

SEQ ID NO: 13667 - DNA, 201 bp, Homo sapiens
gcagatctaaaacctgccaagctcgaacagtgatggcttcctcagcaacgaaagatgattctgtttggttacctgatccaccagaggcatcatcaaggctyctgctctctctttacttataaaatgctgggtatcaaaaaggaagattttgtataaacagttcaaaataaactgcaacagcaagcagcacttttcagggtc

SEQ ID NO: 13668 - DNA, 201 bp, Homo sapiens
tcttaatttttgcgttttaaagttacttccagtaactgacagtaacggccatttactttattctttctcccaagtgaggtgacttataacattcgctcatsatgctaaaacaacacttcactgtctgacaacaatgaagtaaaaaattcaccctccttagcttaggacttaagaacctctaaaatcttgcttccaagcact

SEQ ID NO: 13669 - DNA, 201 bp, Homo sapiens
aaaaaattcaccctccttagcttaggacttaagaacctctaaaatcttgcttccaagcactaggttgtgtcttactggtaccttgtataaggcacacaggrcaagggtgacagctgaactgaagcgaccacccacctgttttggagatgttcacctggttcaaggtgtcagcaaaaggcttcactaagtggccggcaaaca

SEQ ID NO: 13670 - DNA, 201 bp, Homo sapiens
ctaggttgtgtcttactggtaccttgtataaggcacacagggcaagggtgacagctgaactgaagcgaccacccacctgttttggagatgttcacctggtycaaggtgtcagcaaaaggcttcactaagtggccggcaaacagagtaaaaagccctttcagcttttcagcaatgcaatctgccaagttgtaaaatgtcaac

SEQ ID NO: 13671 - DNA, 201 bp, Homo sapiens
tagattgttctcggactcttcaataggtggataacagctttaggatttggaggagtgaacctgagcttacctcagagtgctgggctcggaagtccagggcytccaggaaaaaggcggttagctgagactgatgggaggtgagctcttccttcttcatcaccccaatatgctcttgcaagatgctcataaacggacccatgt

SEQ ID NO: 13672 - DNA, 201 bp, Homo sapiens
acctgagcttacctcagagtgctgggctcggaagtccagggcttccaggaaaaaggcggttagctgagactgatgggaggtgagctcttccttcttcatcrccccaatatgctcttgcaagatgctcataaacggacccatgtgattctaccaataacacaggaaagagatgtgccattttcaaatgattcctagagttca

SEQ ID NO: 13673 - DNA, 201 bp, Homo sapiens
gtgtaagtgaagcggtttaatcatttgccccatggtaatgaaggctcctaaccttgtaaatggcaaatgatcaacacaatggaacagccaggtctcaacaytcttgagcatcttcaatcataaataccactggcccctagcgtgttgacaggaaaccgctgacgtgcaatacaaaaattctgctttgcaagatgccttagg

SEQ ID NO: 13674 - DNA, 201 bp, Homo sapiens
gagcatcttcaatcataaataccactggcccctagcgtgttgacaggaaaccgctgacgtgcaatacaaaaattctgctttgcaagatgccttaggattawacctctcacagtagaaacagggcccatcaatttccacaagtaataaaaggcggctctaccagcccaactccaaagatctcacagaagaaaaaaaagccag

SEQ ID NO: 13675 - DNA, 201 bp, Homo sapiens
gggaggagaaagcccacgttaatgacactaaaatatatctttccaaacaaatgtggataaaagccaagtagagaagatgagaactttgaggtccctaacasaaaataaacagtaagcagccagccattccaagtggctgacatgactttgtttaactttatttgtatttctggctggtgtgtttacagccaataggtcaaa

SEQ ID NO: 13676 - DNA, 201 bp, Homo sapiens
ggttatcattctacagcattttaaactgacacattgtctggaccatgtgggttcttgaggactcatcaaaactcgttactaaaagcatgaatatcaggcgraatagatagcaatgtgacattcatatttatccctaagttccagtctaatgcagtgccctggtatgtggagtgtagacagatgtgggctaatcatggaagg

SEQ ID NO: 13677 - DNA, 201 bp, Homo sapiens
gtggagaccctaaaactgcttgcttgcactggccatcatctcccatcagggtagacggtttcaggtggcagtcctttctcctaaggagttagtcttgtttrtatgtattcaaggaaaaatacatcagtcccttggaactaaaaggcatgcagtcctgagtccccagataggtgaatattgtaacacatacctttcccgaaa

SEQ ID NO: 13678 - DNA, 201 bp, Homo sapiens
cagaccccaggcacagggggccttcctggcgtgtttcactcatacagagggcatcgggtcccaccctgtcactcatttcatcgtctaaaatgtaatcatgwgtgtttgcttcgagccagggacagtgctgctgcaggggacccagctgggaccaaggcagactgtctctcccctcctgggatttacagggtcatggctctg

SEQ ID NO: 13679 - DNA, 201 bp, Homo sapiens
gggcggaaaggaccacagtgtcaagtgtatttttggatcatagttttcaagcatatttttagtaccatttataatttttttatatgtcaatataaaatatwtagaaaatattttctactggatgttacaaattaatctttattatcttttctcaggacttacaaagtacccaagcatctagtctggaactgacagagataa

SEQ ID NO: 13680 - DNA, 201 bp, Homo sapiens
ctctcaacagccatgctcccaccttcttgctgacattacatcttattctctgtaatgtttgccaatctgatggggggcggaaaggaccacagtgtcaagtrtatttttggatcatagttttcaagcatatttttagtaccatttataatttttttatatgtcaatataaaatatttagaaaatattttctactggatgtta

SEQ ID NO: 13681 - DNA, 201 bp, Homo sapiens
gtgaatgaatgaggagggattggtcagtcccttgtcactgggcctggagtgtagtgcctgctggtcctttactggtggctttcctttctgagcactcatgrggcccctgtgtcttccctcatatagattccaggtggatctgcagaatggcagcagcatgaaacctcgagccgatgtggcctttcatttcaatcctcgttt

SEQ ID NO: 13682 - DNA, 201 bp, Homo sapiens
agaaaagattagacagtcagctctttaggcctcatagtgaatgaatgaggagggattggtcagtcccttgtcactgggcctggagtgtagtgcctgctggkcctttactggtggctttcctttctgagcactcatggggcccctgtgtcttccctcatatagattccaggtggatctgcagaatggcagcagcatgaaacc

SEQ ID NO: 13683 - DNA, 201 bp, Homo sapiens
cctagtgtggcctcgaaccttctgttgggatcagcagtggaacagtaggaaaaggaatgagtagacatggcattgcaacaagtctttttttttttttctgktagaattatcatattaagcagaagttttgcttcacaaactctcagccaaatacaaaatactatgaatagtatttaccttgtgtctctttccaaagaactc

SEQ ID NO: 13684 - DNA, 201 bp, Homo sapiens
ggcctagtgtggcctcgaaccttctgttgggatcagcagtggaacagtaggaaaaggaatgagtagacatggcattgcaacaagtctttttttttttttcygttagaattatcatattaagcagaagttttgcttcacaaactctcagccaaatacaaaatactatgaatagtatttaccttgtgtctctttccaaagaac

SEQ ID NO: 13685 - DNA, 201 bp, Homo sapiens
gtgtagtgtccatgagtgcttttatcttaaaaaatgtggctgatgctttccaacactcccctgccctgtgattattatttttttaagcaacagagaaaacygtatcttaatagtattaaaagtattggatttttccctactttgatttgtttaaattggaggaggaagagcaattctttctattcacaataataatagcta

SEQ ID NO: 13686 - DNA, 201 bp, Homo sapiens
cctttccactgctcctatcaaaagaatggaaaccctcaacttgctgctttgcagattcaggttttgtgcttcattctggcctctcggggtggggccgggtkagcagcaaggctgagctgcccctctttcttctgaagccttcatgggggcgaggagcacagggagagctcagtgcagggcctcccagtggccttctcagag

SEQ ID NO: 13687 - DNA, 201 bp, Homo sapiens
ttccttgacagtcctttccactgctcctatcaaaagaatggaaaccctcaacttgctgctttgcagattcaggttttgtgcttcattctggcctctcgggktggggccgggttagcagcaaggctgagctgcccctctttcttctgaagccttcatgggggcgaggagcacagggagagctcagtgcagggcctcccagtg

SEQ ID NO: 13688 - DNA, 201 bp, Homo sapiens
ggctggaacttttctatgtataatcaaatggtttactctgacaccgttagcatgtaacaaacacaaaattttaaactaaggggaaccactaatggcatgtwtcctttcctttcagatgataatttattgtgatgttagagaattcaaggttgcagtaaatggcgtacacagcctggagtacaaacacagatttaaagagct

SEQ ID NO: 13689 - DNA, 201 bp, Homo sapiens
cttcgggatactgctcctgcccgaaagtctttctgaatctcccaaactccattcacctctcccttctctggccttttgagcccgtgtctgtatcattcttyttcacagtttttaacagttgtgctttggctttacgtgtttattttgcctccacaatgggattttaagctccctgagtcagagactatattgtatgctgct

SEQ ID NO: 13690 - DNA, 201 bp, Homo sapiens
gatcttcgggatactgctcctgcccgaaagtctttctgaatctcccaaactccattcacctctcccttctctggccttttgagcccgtgtctgtatcattytttttcacagtttttaacagttgtgctttggctttacgtgtttattttgcctccacaatgggattttaagctccctgagtcagagactatattgtatgct

SEQ ID NO: 13691 - DNA, 201 bp, Homo sapiens
ctactctaccaatgccactgctgtctctgaccccagatgtagctccctctgaccctggatgcagctccctctgaccctcgatatagctgcccctgaccccrgatgtagctgcctttgaccccagatgtagctttctccaaacccagatatagcggctgcccccttgccagagtgaatactgcgtcattgtggcttcttctt

SEQ ID NO: 13692 - DNA, 201 bp, Homo sapiens
accactggacacagatggtactgtgtctctgctactctaccaatgccactgctgtctctgaccccagatgtagctccctctgaccctggatgcagctcccyctgaccctcgatatagctgcccctgaccccggatgtagctgcctttgaccccagatgtagctttctccaaacccagatatagcggctgcccccttgccag

SEQ ID NO: 13693 - DNA, 201 bp, Homo sapiens
tttgatacaggatacagtgtgtattagcaaggttttctttttaatgtttatatttatttagttgagatcatactatatatggctctatagattactttctcacttatattactaacttgtgttattaaatattctgcataaagataattttaagatgaaatttgatgttataaaaacttctcattttattaagagattaac

SEQ ID NO: 13694 - DNA, 201 bp, Homo sapiens
ctacttgctccaccacccctcccttaataataacatttactgttatttcctgggcctaagactctatgttccagaactgtcacagctccccatgtcacacycactagcttgtgatctttgtcaaataactgaaatcttttaagcctctagtttcttcctttgtaaaacagagataaaatgttgtggtttttaagtgagata

SEQ ID NO: 13695 - DNA, 201 bp, Homo sapiens
ttatccctaagttccagtctaatgcagtgccctggtatgtggagtgtagacagatgtgggctaatcatggaaggttccctgaagttgtggatattggtttsgaattcagaaagctgggaaggatgtggaaggctgaaggttggcttttctagatttagggcatgatttgaacaagtccttagaggtgggaagggcagcaca

SEQ ID NO: 13696 - DNA, 201 bp, Homo sapiens
cacacagtcacttagggtcattggtttaggttatcattctacagcattttaaactgacacattgtctggaccatgtgggttcttgaggactcatcaaaacycgttactaaaagcatgaatatcaggcggaatagatagcaatgtgacattcatatttatccctaagttccagtctaatgcagtgccctggtatgtggagtg

SEQ ID NO: 13697 - DNA, 201 bp, Homo sapiens
gcatgcagtcctgagtccccagataggtgaatattgtaacacatacctttcccgaaatatgtttctgggatgctgagcagagaatagtctccttgtgatgyggatgccgggtgtttggccagcctcaatcaccagctcaggtgccactgcctcacacagtcacttagggtcattggtttaggttatcattctacagcattt

SEQ ID NO: 13698 - DNA, 201 bp, Homo sapiens
cgaaggatactgaccttttggcatttgcattcacttctcctttaacgacgacagttcgtccagggcccatgggggtgttcaaccttgcagcgaatggcagsctctgaaaagaagccacagtcaggaccaagaggcctgcagaaagcgatctccagggaaaactcgtgtccaaagaacactacggaatgtttcagagccatg

SEQ ID NO: 13699 - DNA, 201 bp, Homo sapiens
ccttgcagcgaatggcagcctctgaaaagaagccacagtcaggaccaagaggcctgcagaaagcgatctccagggaaaactcgtgtccaaagaacactacrgaatgtttcagagccatgaccctgtaaatcccaggaggggagagacagtctgccttggtcccagctgggtcccctgcagcagcactgtccctggctcgaa

SEQ ID NO: 13700 - DNA, 201 bp, Homo sapiens
ctctatataaaaattaagttgtaatgagctgttacgagtaacctgtatccacaatagaggcccaaagcagccccctctgcatttgtgtgccgtccctggayggattcgagagtcaaccaggcctgcctctgagccattcctgtgtatttcctcagcacctccctgcttggctgcttccccttcaggcagaacacagtactg

SEQ ID NO: 13701 - DNA, 201 bp, Homo sapiens
cttcaacccctgggagaataactgcaatttaaaaatgcgctgttattaatggagaaagtgaggtcttaccgactggcacgttcacacctcacagacagaayagaatcttagcattctgggggcaccctggaaaggacaactaagacacgtttgaagttcatgtagtgctgggtgaaggtggtggctcaggcctgtagtccc

SEQ ID NO: 13702 - DNA, 201 bp, Homo sapiens
catgactgtctttgcattgaaaattttgatagatactaactcgcccttcacaagggtaaaaacagtttgcactctcaacagccatgctcccaccttcttgytgacattacatcttattctctgtaatgtttgccaatctgatggggggcggaaaggaccacagtgtcaagtgtatttttggatcatagttttcaagcatat

SEQ ID NO: 13703 - DNA, 201 bp, Homo sapiens
tttgcaatactttgataaatgaaaaatggggacgggaagagatcacctatgacacgcctttcaaaagagaaaagtcttttgagatcgtgattatggtgctraaggacaaattccaggtaggttttggagagggacaggttgagtcctcattagtgagcaggagtgcacaggggtgcttttcacatttgtgagcccagcctt

SEQ ID NO: 13704 - DNA, 201 bp, Homo sapiens
ggtatttaagagcatctaataggcacagaattgtgctccatactgcttaaactgttccctaagtgtccaatttggagaaaacacccacacgcaggataacyggcgagtgacgcggagtggctgcgagtccaagttatcactaacggatggggagcttgggctgggcacagtccagcgtactgaacccttcccccaccgttt

SEQ ID NO: 13705 - DNA, 201 bp, Homo sapiens
gacggttcccatgaagaggcatctgttgtcaccactggacacagatggtactgtgtctctgctactctaccaatgccactgctgtctctgaccccagatgyagctccctctgaccctggatgcagctccctctgaccctcgatatagctgcccctgaccccggatgtagctgcctttgaccccagatgtagctttctccaa

SEQ ID NO: 13706 - DNA, 201 bp, Homo sapiens
cattcatctaaaaaaaaaaaaaaaaaatcaaaattaaaatctgagtcagtccgcctgcctcggttctcattagtttaattcttaatgccttgcactttccrgcaatcattcaatcaaaagagtgaaatgaagcacattaacaaagcaggaggcgccacggaccgcctccctccacaccgctccttccgccttcattccttg

SEQ ID NO: 13707 - DNA, 201 bp, Homo sapiens
agtttccagttgctgaatagtcttttggcactgatgttctacttcttcacattcatctaaaaaaaaaaaaaaaaaatcaaaattaaaatctgagtcagtcygcctgcctcggttctcattagtttaattcttaatgccttgcactttccggcaatcattcaatcaaaagagtgaaatgaagcacattaacaaagcaggagg

SEQ ID NO: 13708 - DNA, 201 bp, Homo sapiens
aactgacacattgtctggaccatgtgggttcttgaggactcatcaaaactcgttactaaaagcatgaatatcaggcggaatagatagcaatgtgacattcrtatttatccctaagttccagtctaatgcagtgccctggtatgtggagtgtagacagatgtgggctaatcatggaaggttccctgaagttgtggatattgg

SEQ ID NO: 13709 - DNA, 201 bp, Homo sapiens
tcattccattccttactgtagaactgtttccctacagcctagtaatagaggaggagacatttctaaaatcgcacccagaactgtctacaccaagagcaaakattcgactgtcaatcacactttgacttgcaccaaaataccacctatgaactatgtgtcaaaggtttgaagagcaccaaattttcttaactctatataaaa

SEQ ID NO: 13710 - DNA, 201 bp, Homo sapiens
actgtttccctacagcctagtaatagaggaggagacatttctaaaatcgcacccagaactgtctacaccaagagcaaagattcgactgtcaatcacacttwgacttgcaccaaaataccacctatgaactatgtgtcaaaggtttgaagagcaccaaattttcttaactctatataaaaattaagttgtaatgagctgtta

SEQ ID NO: 13711 - DNA, 201 bp, Homo sapiens
ccattccttactgtagaactgtttccctacagcctagtaatagaggaggagacatttctaaaatcgcacccagaactgtctacaccaagagcaaagattcractgtcaatcacactttgacttgcaccaaaataccacctatgaactatgtgtcaaaggtttgaagagcaccaaattttcttaactctatataaaaattaa

SEQ ID NO: 13712 - DNA, 201 bp, Homo sapiens
agtgaaagggatggctggctgaaggaatgaatagatgaatgttatatgcttttgaacaatcgtcttttccatttaattttctaattcaggagcagtaattrtccttgtgttgatcactgctgacgattttctatactgataggtcctttccgggggcttccatctcttgccttttaaatatgcttgcattgagattatctc

SEQ ID NO: 13713 - DNA, 201 bp, Homo sapiens
ccactgctgtctctgaccccagatgtagctccctctgaccctggatgcagctccctctgaccctcgatatagctgcccctgaccccggatgtagctgcctytgaccccagatgtagctttctccaaacccagatatagcggctgcccccttgccagagtgaatactgcgtcattgtggcttcttcttgtcactggttctta

SEQ ID NO: 13714 - DNA, 201 bp, Homo sapiens
gccactgctgtctctgaccccagatgtagctccctctgaccctggatgcagctccctctgaccctcgatatagctgcccctgaccccggatgtagctgccyttgaccccagatgtagctttctccaaacccagatatagcggctgcccccttgccagagtgaatactgcgtcattgtggcttcttcttgtcactggttctt

SEQ ID NO: 13715 - DNA, 201 bp, Homo sapiens
gtggtgtttgcggggaaacagagctggacaaaaggcaagtgcttgctgacttctaaggcagtttccagtagccttccctgagcacttcacttccatcttaycagcagagctttagctgcacaggcaggcctagctgcgagggaggctgggaaaggtaggtttttattctgggcagattcagacccagttcaaactcagggg

SEQ ID NO: 13716 - DNA, 201 bp, Homo sapiens
tcacttctgtgctttgggtagctggatgggtgcatgtggtgtttgcggggaaacagagctggacaaaaggcaagtgcttgctgacttctaaggcagtttcyagtagccttccctgagcacttcacttccatcttaccagcagagctttagctgcacaggcaggcctagctgcgagggaggctgggaaaggtaggtttttat

SEQ ID NO: 13717 - DNA, 201 bp, Homo sapiens
agatttccagccctcacttctgtgctttgggtagctggatgggtgcatgtggtgtttgcggggaaacagagctggacaaaaggcaagtgcttgctgacttytaaggcagtttccagtagccttccctgagcacttcacttccatcttaccagcagagctttagctgcacaggcaggcctagctgcgagggaggctgggaaa

SEQ ID NO: 13718 - DNA, 201 bp, Homo sapiens
tttggtcccagaagcttacacctgctggccctctggcctgtggagcttgcccacagtagaggtatgtaccaacgcgagagaagactcgaatgcctctggcrcagatcctttctgatcttcgggatactgctcctgcccgaaagtctttctgaatctcccaaactccattcacctctcccttctctggccttttgagcccgt

SEQ ID NO: 13719 - DNA, 201 bp, Homo sapiens
aaacagtttgcactctcaacagccatgctcccaccttcttgctgacattacatcttattctctgtaatgtttgccaatctgatggggggcggaaaggaccmcagtgtcaagtgtatttttggatcatagttttcaagcatatttttagtaccatttataatttttttatatgtcaatataaaatatttagaaaatattttc

SEQ ID NO: 13720 - DNA, 201 bp, Homo sapiens
aaatggagtatttctgtaagacaggttcctaggctgggagtgcctgagtcaaagagcacagtcatgtgttgcataaggacagttcagtcaaagatgaaccrcatatacaaccgtggtcccataagattgtcatatactgtatttttaccataccttttctatgtttaggtaagtttatatgcacaaatacttaccatcctg

SEQ ID NO: 13721 - DNA, 201 bp, Homo sapiens
tctgagccattcctgtgtatttcctcagcacctccctgcttggctgcttccccttcaggcagaacacagtactgcctcagaccccaggcacagggggcctwcctggcgtgtttcactcatacagagggcatcgggtcccaccctgtcactcatttcatcgtctaaaatgtaatcatgtgtgtttgcttcgagccagggaca

SEQ ID NO: 13722 - DNA, 201 bp, Homo sapiens
ccagaactgtctacaccaagagcaaagattcgactgtcaatcacactttgacttgcaccaaaataccacctatgaactatgtgtcaaaggtttgaagagcmccaaattttcttaactctatataaaaattaagttgtaatgagctgttacgagtaacctgtatccacaatagaggcccaaagcagccccctctgcatttgt

SEQ ID NO: 13723 - DNA, 201 bp, Homo sapiens
atatgcttgcattgagattatctcaggtctttccattatgccattactttcattttaaatcttcttgctctttcaaatacactttagttgtatctacagtkttttaaaaacaatctcattcagtgttgtaatttcatctgtgggctcttcctctggatgaaatccgtgttccagctgttcggcagcatcagatggttgtga

SEQ ID NO: 13724 - DNA, 201 bp, Homo sapiens; identical to SEQ ID NO: 1577

SEQ ID NO: 13725 - DNA, 201 bp, Homo sapiens
caaaagtgctgggattacaggcgtgaggcaccatgcctggccaacttagttatttaaagataatcaattagtatattttataagctagacttaggaaaackgttttcagctgggcatggtggctcacacctgtaatcccagcactttgggaggccgaggcaggtggatcacgaggtcaggagttcaagaccagcctggcca

SEQ ID NO: 13726 - DNA, 201 bp, Homo sapiens
ccaaatacaaaatactatgaatagtatttaccttgtgtctctttccaaagaactcatagtggtttgcagctattgcagatatcctggccatgaggtatgcrgttcctttttttttttttgagacggagccttgctctgtcgcccaggctggagcatagtggcgcgatctcggctcactgcaagctccgcctcccgggttcg

SEQ ID NO: 13727 - DNA, 201 bp, Homo sapiens
actctcagccaaatacaaaatactatgaatagtatttaccttgtgtctctttccaaagaactcatagtggtttgcagctattgcagatatcctggccatgmggtatgcagttcctttttttttttttgagacggagccttgctctgtcgcccaggctggagcatagtggcgcgatctcggctcactgcaagctccgcctcc

SEQ ID NO: 13728 - DNA, 201 bp, Homo sapiens; identical to SEQ ID NO: 1571

SEQ ID NO: 13729 - DNA, 201 bp, Homo sapiens
gggacagtgctgctgcaggggacccagctgggaccaaggcagactgtctctcccctcctgggatttacagggtcatggctctgaaacattccgtagtgttstttggacacgagttttccctggagatcgctttctgcaggcctcttggtcctgactgtggcttcttttcagaggctgccattcgctgcaaggttgaacacc

SEQ ID NO: 13730 - DNA, 201 bp, Homo sapiens
ttaataaaacacacacagtttttagctgggtagcagctatttcctttgcatgggcataaaatggagtatttctgtaagacaggttcctaggctgggagtgyctgagtcaaagagcacagtcatgtgttgcataaggacagttcagtcaaagatgaaccacatatacaaccgtggtcccataagattgtcatatactgtatt

SEQ ID NO: 13731 - DNA, 201 bp, Homo sapiens
ctagattcaatcaggatttccttgatttgtgcaaagtaaaatattacaataaatttgatactgctacttgtataaaaacctatggtttaaaatgtgggggktcatcataatagtctcattgttagcatatcctaataaagaatttgaactaataaatcctattaataaaattctgctttggtctgttatagccagtaaagt

SEQ ID NO: 13732 - DNA, 201 bp, Homo sapiens
ctctgtcgcccaggctgaagttcggtggctgatgacagctcactgcagcctcccggctcaagtgattcttccacctcagcttcctgaatggctgggactasaggcgtgtgtcaccacacccagttagttattttatttttcgtagagatggtggtctcactgtattgcccaggctggtctcgaactcctgggctcaagcgc

SEQ ID NO: 13733 - DNA, 201 bp, Homo sapiens
gaagttcggtggctgatgacagctcactgcagcctcccggctcaagtgattcttccacctcagcttcctgaatggctgggactagaggcgtgtgtcaccayacccagttagttattttatttttcgtagagatggtggtctcactgtattgcccaggctggtctcgaactcctgggctcaagcgcttttccacctcggctt

SEQ ID NO: 13734 - DNA, 201 bp, Homo sapiens
ccacacccagttagttattttatttttcgtagagatggtggtctcactgtattgcccaggctggtctcgaactcctgggctcaagcgcttttccacctcgrcttcccaaattgctgggattacaggtgtgagccactgcaccggcccatcctttattttaatattatgcagtgccctgagacatataaaaaacccaccttc

SEQ ID NO: 13735 - DNA, 201 bp, Homo sapiens
tcccaaattgctgggattacaggtgtgagccactgcaccggcccatcctttattttaatattatgcagtgccctgagacatataaaaaacccaccttcccmagtaaaggaaattcaagctgatgcctgcagagccttctttaacaaaggctctgaaataccctctctcattaaaatgatactttccaataaaattttgttt

SEQ ID NO: 13736 - DNA, 201 bp, Homo sapiens
tataaaaaacccaccttcccaagtaaaggaaattcaagctgatgcctgcagagccttctttaacaaaggctctgaaataccctctctcattaaaatgatamtttccaataaaattttgtttaacaatgatttacaaaatgataaaatttatttattttgattgtgtatggatcatggtaacaataaaaagacttgtaaaaa

SEQ ID NO: 13737 - DNA, 201 bp, Homo sapiens
atttatttattttgattgtgtatggatcatggtaacaataaaaagacttgtaaaaataactaaattgaaagaatcttgaacatttagagccttaagactgyaggaattgaagaccacagaattattaatttatattaatatttttgttgcagagacataatgaatgatcaacgaaaggcttttaagcgttaaaaatatatt

SEQ ID NO: 13738 - DNA, 201 bp, Homo sapiens
tattaatatttttgttgcagagacataatgaatgatcaacgaaaggcttttaagcgttaaaaatatattacactagataaaattatttgcgggaatgggayggaaatacattttcaagagagaaaggagcaatgtaaaatgaagatgtaaaatccttctgctggttgtccttggggttttcttttaaagaaaagcttggca

SEQ ID NO: 13739 - DNA, 201 bp, Homo sapiens
aaggcttttaagcgttaaaaatatattacactagataaaattatttgcgggaatgggatggaaatacattttcaagagagaaaggagcaatgtaaaatgargatgtaaaatccttctgctggttgtccttggggttttcttttaaagaaaagcttggcagtgtttttctttttttccattggatgatggtgaatatcaaat

SEQ ID NO: 13740 - DNA, 201 bp, Homo sapiens
gatggaaatacattttcaagagagaaaggagcaatgtaaaatgaagatgtaaaatccttctgctggttgtccttggggttttcttttaaagaaaagcttgrcagtgtttttctttttttccattggatgatggtgaatatcaaatcactttggtgctaatatttcatttaatacattaattttaaaattttctgtagaggt

SEQ ID NO: 13741 - DNA, 201 bp, Homo sapiens
tttgaagcttttacagattaaatgaagtctgagatttgcttcaaaatgaaccagtggtggggaggaagtgggtgaggtgtaggtgaaacaagattggccasgtcgataattgctggagctgggcgatgaaagcacaggtatttatcacaccatctctctacttttgtgtgtttttttgtttgtttttggttttggttttaa

SEQ ID NO: 13742 - DNA, 201 bp, Homo sapiens
gtgatccatctgcctcggcctcccaaagtgctgggattacaggcataagccaccgcgcccggcccatgtatactatttatacatttttagtatcattttgbctttacattttacataatttcagatacattttcctcatatcaaataattcagcattttttagtactaacatcatagtctgtaagccattcaaaaaatgta

SEQ ID NO: 13743 - DNA, 201 bp, Homo sapiens
tgggcaaggaaagaggacaatatagatgaaaaagaaattgatcctaccagaagtgatccttttatctgcataactctcaggcagttgtggcaaataattgscagtatctattgttctgaaactggttttcgcaacttttattgggaacaccatcccctctcctgcatgatcagtttctcctctccacggatcattcacatg

SEQ ID NO: 13744 - DNA, 201 bp, Homo sapiens
gacaccactctcagcaaattcccctggttgtcccttctcagtctcatttattggcgttgtcttatctccccagggctgtccgaggtgattttctcccactrctctcctaggtggtgccatccaatctcatgatgtcatatcattcttccctcatgcttcagccatactggttggtggcctttgtttcctgaacacatttaa

SEQ ID NO: 13745 - DNA, 201 bp, Homo sapiens
tttgttaactctgctctctggccctttcactcagccccgtttgcacctaaatatgacttacaaaagaaacacagcatttatgtgtacttatttcaacttaytttagctttgtaaagaagtacaaggttgactcagggcccagcttggtgtctcatgcctgtaatttcagcattgtgggaggccaaggcaggaagatattgt

SEQ ID NO: 13746 - DNA, 201 bp, Homo sapiens
gttgactcagggcccagcttggtgtctcatgcctgtaatttcagcattgtgggaggccaaggcaggaagatattgtgagcccaggagtttgagaccagccygggcaacacagtggaccctgtctctacaaaaaaaaatttttaaattagctgggcatagtggtgtgcgtctatagtcccagctactcctggggctgaggtg

SEQ ID NO: 13747 - DNA, 201 bp, Homo sapiens
aagcattacactatgcactggagactgtataagacaagttccttttctcaaactacagtcgagttggatagataaaacacacaacacataccaaaagacarctataaatccaaggcagtgtatgtcaagggtaaattcacctattcagattggatcttgagaagtgcatcaggcttggaaaatgggtaaggaggagagaaa

SEQ ID NO: 13748 - DNA, 201 bp, Homo sapiens
taaaacacacaacacataccaaaagacagctataaatccaaggcagtgtatgtcaagggtaaattcacctattcagattggatcttgagaagtgcatcagrcttggaaaatgggtaaggaggagagaaaagcaacagtgaatcagaacatgagttcccagttatgggacttgtaatgaattcctcaattaaaacaaaaaat

SEQ ID NO: 13749 - DNA, 201 bp, Homo sapiens
aagtctcttctggcactgtctggacttggatccgaggcagacgaggaagctgagaaaaccctggcgttgaccccgtggacctgggcgccccgggaaggccrgcgcttggtccaggcaggcggggcctgtgcggtgaccaccctggtcctgaaaagtcccagccccgagcgccctccctcctagacctggaggcctggaaca

SEQ ID NO: 13750 - DNA, 201 bp, Homo sapiens
tctgtgctcgtcccacagcaagccagtcgcggtccaaggctccagaggctgtgcaggaggccgagctgggtggcgatcagcggcgggtccctgtccaaaayccagcagagccgccagggacgccccagacacagaaggcggggcgcggggagggtggggagaccacagcagtgaggcgcgcgagccgggaagtgaacgagg

SEQ ID NO: 13751 - DNA, 201 bp, Homo sapiens
ggtccctgtccaaaacccagcagagccgccagggacgccccagacacagaaggcggggcgcggggagggtggggagaccacagcagtgaggcgcgcgagcygggaagtgaacgaggactgactcctgtcgcttcccgtagccgcccacggacgccagagccgggaaccctgacggcacttagctgctgacaaacaacctgc

SEQ ID NO: 13752 - DNA, 201 bp, Homo sapiens
tttgatgggtgggacagtgtccagtccaccccgacccgccggtcctcaccgcggcagagccggggctgggtggcggggacgctgcctctgcaggcgaggcrctccggggcataagggattatcaggagtcgcggcctttcttggacatccctggctggggtcaggctgtttgccctggggtgtctcctcgctgcaaaccca

SEQ ID NO: 13753 - DNA, 201 bp, Homo sapiens; identical to SEQ ID NO: 13752

SEQ ID NO: 13754 - DNA, 201 bp, Homo sapiens
tcttacttcctgaattgagtcacggagccagagttttgaggttttgactaacgaattaagttaatgacatggggctatatttaggtggtaaaccaagaggkatacagttttttttcttaataaagaaaaagtgatagatttgatcggtgtgtattgttggtgtgcagtataatgacagaattgctggaagtaaaatacagg

SEQ ID NO: 13755 - DNA, 201 bp, Homo sapiens
ctcctgagtagctgggactacaggtgcatgccactacgtctggctaatttttgtatttttagtagggatgggatttcaccatattggtcaggctggtctcyaactcctgaacctcaggtgatccacccgccttggcctcccaaagtgctgggattacaggtgtgagccaccatgcctggcctattttagtatttttaataa

SEQ ID NO: 13756 - DNA, 201 bp, Homo sapiens
gaatattaattatccattgggagacagggcaagaataaaagccagtgaacatatttaaagcacctactatgtaatagagatggtggtgggtgctgattacraaacagctcttgtcctctagtggaggaagaagtcacaatgataatatgacgtgatgaaacagtgttatgaacagggaacgtctgggtagagtggagggaa

SEQ ID NO: 13757 - DNA, 201 bp, Homo sapiens
ctctgccctctgatttttcactctcttttcttttttggttttactagtgaaattttgtctttaatgtctctttcttttatgtctttaccgatcactcataratttttttttccatatgtatccagttccaacctttcacctaatgtgaacccccaactctcagttgctcagccagcccttcaagactaggagttcaaaacc

SEQ ID NO: 13758 - DNA, 201 bp, Homo sapiens
attcaaacagtatttaagagtttcagtgaaacatgcattttccttctaccctggtacttagttttactccccaagggcaatcactttttactggtttttaraaatatatccttcctgagatacttatgaatatccaaaagtgtgtgtgttgtgtatatcaccttttatatatcctgtctctttacgtgcatgcattttacc

SEQ ID NO: 13759 - DNA, 201 bp, Homo sapiens
tatttagaacttcctcatttattttaacagctgcataattagcagtaaaacttatgtaagcagtcccttgtgaagggctgtgtctttttgcgattatatcyggtgctatagtgtacatccttgtgtgtgcatcttggtgtgcctgtgctacgtatttctgtaggataaatctgtaaaagtggaatcactaggtcagagggt

SEQ ID NO: 13760 - DNA, 201 bp, Homo sapiens
gctatagtgtacatccttgtgtgtgcatcttggtgtgcctgtgctacgtatttctgtaggataaatctgtaaaagtggaatcactaggtcagagggtatgrtccattttctttacttatttattttatttatttattcatttatttttgagacagagtcttgctctgtcgcccaggctggagtgcagtggcatgatcttgg

SEQ ID NO: 13761 - DNA, 201 bp, Homo sapiens
ccgatctcggctcattgcaacctccgcctcctgggttcaagtgattctcctgcctcagcctcctgagtagctgggattacagtcatgtgccaccatgcccrgctaattttgtatttttagtagagacggggtttctccacgttggtcaggctggtcttcaactcccaacctcaagtgatctgcccaccttcgcctcccaaa

SEQ ID NO: 13762 - DNA, 201 bp, Homo sapiens
tgtcctccgttttcacagaagccacatagtcgtgggttaaatgagtcagcggcagggcactgtgtctcatagttaaaaaaaaaaaaaagtattactgaagyaatgcaggatcttttctgaagtagaaggcatgatgaacccagaaaactaaagcagcaagtggccaccgttcttagcatagttgtttctcaaactggaaca

SEQ ID NO: 13763 - DNA, 201 bp, Homo sapiens
taggtccttccccattctctacacacaaaatcagatactctgatgtgcagctgtagccccagtctacactgtctgttgtattttttgttttctggtgtcaygtgcctcccaccctgctcctagcaattgccatgacaacaaatagataattggcttccgtaatttctcatcttattgcctaaggcaacagagagcttgtgg

SEQ ID NO: 13764 - DNA, 201 bp, Homo sapiens
ttttctctatcaataatgagtgtgggttgtaattgcttagtaagtaattttgtttatgtaaacgtacatttgttaaattttttttcttaggtaatcccgtwtgttggcaccattcctgatcagctggatcctggaactttgattgtgatacgtgggcatgttcctagtgacgcagacaggtaaaatcactgtgctaaagga

SEQ ID NO: 13765 - DNA, 201 bp, Homo sapiens
tgagtgtgggttgtaattgcttagtaagtaattttgtttatgtaaacgtacatttgttaaattttttttcttaggtaatcccgtatgttggcaccattccygatcagctggatcctggaactttgattgtgatacgtgggcatgttcctagtgacgcagacaggtaaaatcactgtgctaaaggaaggagcatgaataggc

SEQ ID NO: 13766 - DNA, 201 bp, Homo sapiens
tgtttatgtaaacgtacatttgttaaattttttttcttaggtaatcccgtatgttggcaccattcctgatcagctggatcctggaactttgattgtgataygtgggcatgttcctagtgacgcagacaggtaaaatcactgtgctaaaggaaggagcatgaataggctgtctttttgtgattgtggaatgataacagagta

SEQ ID NO: 13767 - DNA, 201 bp, Homo sapiens
acaggtaaaatcactgtgctaaaggaaggagcatgaataggctgtctttttgtgattgtggaatgataacagagtaaggcgggagagaccatttgatactytgaggcccaattagctttcatcagcagccctggccaaggtgctgaggagattggaatgaatgactaaataaaggttattgggatttatttcattgctgta

SEQ ID NO: 13768 - DNA, 201 bp, Homo sapiens
ggaatgaatgactaaataaaggttattgggatttatttcattgctgtaagtctgatttcagtataaaaaattagaactatcagctggatgtggtgacttamacatacttttccagcactttgggaggccaaggcaggaggattgtttgaggccaggagtttgagaccagcctgggcaacatagtgagaccccccatctgta

SEQ ID NO: 13769 - DNA, 201 bp, Homo sapiens
atttcattgctgtaagtctgatttcagtataaaaaattagaactatcagctggatgtggtgacttaaacatacttttccagcactttgggaggccaaggcrggaggattgtttgaggccaggagtttgagaccagcctgggcaacatagtgagaccccccatctgtaaaaaaaaaaaaaatttaaaaattaactggcttgg

SEQ ID NO: 13770 - DNA, 201 bp, Homo sapiens
gcactttgggaggccaaggcaggaggattgtttgaggccaggagtttgagaccagcctgggcaacatagtgagaccccccatctgtaaaaaaaaaaaaaawttaaaaattaactggcttggtggtgtgcgcctgtagttgtagctactcagggggctgaggtaggaggattccttgagcccaggagtttgaggttgcagtg

SEQ ID NO: 13771 - DNA, 201 bp, Homo sapiens
caaatgccaaaaggtcagtatccttcggtaccagtcacagtgcagatacttccgtgcctgttaccgccttccacccgtgaacggtcctgtgagctggaagwagggctagcgtcagaatcttcatttccaaagtgagatgattcaagcaggaggtggttagattgtgaacagccagtgggcagcagagccgactaaggccgt

SEQ ID NO: 13772 - DNA, 201 bp, Homo sapiens
gaactatgtgtcaaaggtttgaagagcaccaaattttcttaactctatataaaaattaagttgtaatgagctgttacgagtaacctgtatccacaatagargcccaaagcagccccctctgcatttgtgtgccgtccctggacggattcgagagtcaaccaggcctgcctctgagccattcctgtgtatttcctcagcacc

SEQ ID NO: 13773 - DNA, 201 bp, Homo sapiens
gagcaaagattcgactgtcaatcacactttgacttgcaccaaaataccacctatgaactatgtgtcaaaggtttgaagagcaccaaattttcttaactctrtataaaaattaagttgtaatgagctgttacgagtaacctgtatccacaatagaggcccaaagcagccccctctgcatttgtgtgccgtccctggacggat

SEQ ID NO: 13774 - DNA, 201 bp, Homo sapiens; identical to SEQ ID NO: 1665

SEQ ID NO: 13775 - DNA, 201 bp, Homo sapiens
cgagccagggacagtgctgctgcaggggacccagctgggaccaaggcagactgtctctcccctcctgggatttacagggtcatggctctgaaacattccgkagtgttctttggacacgagttttccctggagatcgctttctgcaggcctcttggtcctgactgtggcttcttttcagaggctgccattcgctgcaaggtt

SEQ ID NO: 13776 - DNA, 201 bp, Homo sapiens
tttcatcgtctaaaatgtaatcatgtgtgtttgcttcgagccagggacagtgctgctgcaggggacccagctgggaccaaggcagactgtctctcccctcstgggatttacagggtcatggctctgaaacattccgtagtgttctttggacacgagttttccctggagatcgctttctgcaggcctcttggtcctgactgt

SEQ ID NO: 13777 - DNA, 201 bp, Homo sapiens
gtgcctgttaccgccttccacccgtgaacggtcctgtgagctggaagaagggctagcgtcagaatcttcatttccaaagtgagatgattcaagcaggaggwggttagattgtgaacagccagtgggcagcagagccgactaaggccgtgttctgacctcggctttttctggccagacaagagagtagcatttttgtccacg

SEQ ID NO: 13778 - DNA, 201 bp, Homo sapiens
ttgcatagaaaatgaacagtttaaaccgtggagggcagcttcattcattccattccttactgtagaactgtttccctacagcctagtaatagaggaggagrcatttctaaaatcgcacccagaactgtctacaccaagagcaaagattcgactgtcaatcacactttgacttgcaccaaaataccacctatgaactatgtg

SEQ ID NO: 13779 - DNA, 201 bp, Homo sapiens
gattctgagatttatgtgcagccttaaaaagtgtagtttttctctatcaataatgagtgtgggttgtaattgcttagtaagtaattttgtttatgtaaacrtacatttgttaaattttttttcttaggtaatcccgtatgttggcaccattcctgatcagctggatcctggaactttgattgtgatacgtgggcatgttcc

SEQ ID NO: 13780 - DNA, 201 bp, Homo sapiens
ttttcctctatttttactttacacagggccagtgcctcagtttcaatccaggtaacctttaaatgaaacttgcctaaaatcttaggtcatacacagaagakactccaatcgacaagaagctggaaaagaatgatgttgtccttaaacaacctacagaatatcatctataacccggtaactgatttctataagataactttt

SEQ ID NO: 13781 - DNA, 201 bp, Homo sapiens
atccaaaattatttagtatatgagcacactggtaagaatgggaggcagatcgttgattgtaataatattctattatttggtaaatatcagtaacataatayataatttaaattttaaaataggatatgaagaaaaatgctacatgcttacttttcttttcctctatttttactttacacagggccagtgcctcagtttcaa

SEQ ID NO: 13782 - DNA, 201 bp, Homo sapiens
caaaaaggaagattttgtataaacagttcaaaataaactgcaacagcaagcagcacttttcagggtcattttcagagtcaaaaaatgcttcatctgtagaygtgggaagagtaaaaatgaaaaaacactgaacttaaccatttaatctccaatgtttacattgaaatcactattaaaataactaaatcagaagagtctaaa

SEQ ID NO: 13783 - DNA, 201 bp, Homo sapiens
ttactagggggcctacatctgtgaccacctgcaggctgtttaggctatgcagtgaaaagatgcagtttcagtacttgtcacgcagttcctaaccttaggcraggagtctctcgtctttagcagaatctggtagttcagtggtttccaaagagagtcatccgccatggccaccgaaaactgtgcgatgcatggtatcaggtg

SEQ ID NO: 13784 - DNA, 201 bp, Homo sapiens
atcaaagcagcaaatcgaacctgaaagggataaaagagcaaagaaataaaaagtagtgttactgtatttattatcttaagagctgtactgacttgagacargctctaactttttaaacattagttcacatgcgtttattcacttcattatgttcattaagctttcatcttagaataccagtttcaccatttgggagctgtt

SEQ ID NO: 13785 - DNA, 201 bp, Homo sapiens
aagaaaggaatggattctggtagcaagacaatataattctcctttagtttttcagccagtgctaacacagtaatcaaagcagcaaatcgaacctgaaaggrataaaagagcaaagaaataaaaagtagtgttactgtatttattatcttaagagctgtactgacttgagacaagctctaactttttaaacattagttcaca

SEQ ID NO: 13786 - DNA, 201 bp, Homo sapiens
atgaggcagacagtgccaccaccagggacactttagttagattagggtcttggaagtcagaaggaagtcagcagcagcaggctggaacttttctatgtatwatcaaatggtttactctgacaccgttagcatgtaacaaacacaaaattttaaactaaggggaaccactaatggcatgtatcctttcctttcagatgataa

SEQ ID NO: 13787 - DNA, 201 bp, Homo sapiens
tcctcattagtgagcaggagtgcacaggggtgcttttcacatttgtgagcccagccttatatttcctacacctgagatatagtttgtttggctttgtagtytttctccataaaaggaccaggaaggcacctaaatgtgaggtatggcaccactactctccagccagttgttgccatgcagaaatatggtccactgtgacca

SEQ ID NO: 13788 - DNA, 201 bp, Homo sapiens
gtttcatagagttagaatcatagttcaagtctggtcactaacattgctgaaattgccactactctgtcctacttggttaattaaggtttttttttttcttyctttctcaaaagctttaatgttgacctactagcaggaaaatcaaaggatattgctctacacttgaacccacgcctgaatattaaagcatttgtaagaaat

SEQ ID NO: 13789 - DNA, 201 bp, Homo sapiens
gaggttacagtttttgaaaatgggacagcaataagaatcctgggagcaggggtgggataagtggtccatttaaatcaagtcctaactcagtatgtggaagytgtgtatgttttttgtttacttggagattgtaatttgcccctttttataacgtgggcaatcagtataaatggcaaagccagtagagtgtcaaattatgca

SEQ ID NO: 13790 - DNA, 201 bp, Homo sapiens
gtcttttgagatcgtgattatggtgctgaaggacaaattccaggtaggttttggagagggacaggttgagtcctcattagtgagcaggagtgcacaggggkgcttttcacatttgtgagcccagccttatatttcctacacctgagatatagtttgtttggctttgtagtttttctccataaaaggaccaggaaggcacct

SEQ ID NO: 13791 - DNA, 201 bp, Homo sapiens
ttttgagatcgtgattatggtgctgaaggacaaattccaggtaggttttggagagggacaggttgagtcctcattagtgagcaggagtgcacaggggtgcytttcacatttgtgagcccagccttatatttcctacacctgagatatagtttgtttggctttgtagtttttctccataaaaggaccaggaaggcacctaaa

SEQ ID NO: 13792 - DNA, 201 bp, Homo sapiens
aaggacaaattccaggtaggttttggagagggacaggttgagtcctcattagtgagcaggagtgcacaggggtgcttttcacatttgtgagcccagccttrtatttcctacacctgagatatagtttgtttggctttgtagtttttctccataaaaggaccaggaaggcacctaaatgtgaggtatggcaccactactctc

SEQ ID NO: 13793 - DNA, 201 bp, Homo sapiens
tcatagttcactgcagcctctacctccccggctcaagtaatcctcctgcctcagccttctgagtatctgggactacaggcatgagccaccatgcccagccytttcttttcttttctttcttttctttctctctctgtctctctttctttcttttttcctccctttcttctttttttttgatggagtcttgcactatcgcca

SEQ ID NO: 13794 - DNA, 201 bp, Homo sapiens
cataccctacatatgcatgcacacacatcatatatatgtatgcatatatgatatatacatatatgctatgtaaacatatatagtgtgtatatacatgtgtrtatgtgtatatgtgtgtatatgtgtatatatacacgtgtgtgtgtacatatatacatcatatatgtgtgtctatatatgtatatatgggtgtgtctatat

SEQ ID NO: 13795 - DNA, 201 bp, Homo sapiens
tgtgtgtatatgtgtatatatacacgtgtgtgtgtacatatatacatcatatatgtgtgtctatatatgtatatatgggtgtgtctatatatgtgtatatrtacgcaaatacgtatatgtgatgtatatatataagatgtgtgtgtgtatatatatgtgtttgcatgtgtgtgtgtatatatatatagtatatacatattt

SEQ ID NO: 13796 - DNA, 201 bp, Homo sapiens
atatatacatcatatatgtgtgtctatatatgtatatatgggtgtgtctatatatgtgtatatgtacgcaaatacgtatatgtgatgtatatatataagatgtgtgtgtgtatatatatgtgtttgcatgtgtgtgtgtatatatatatagtatatacatattttttgagacagcatctcactctgtcgcccaggctgaag

SEQ ID NO: 13797 - DNA, 201 bp, Homo sapiens
tatatacatcatatatgtgtgtctatatatgtatatatgggtgtgtctatatatgtgtatatgtacgcaaatacgtatatgtgatgtatatatataagatgtgtgtgtgtatatatatgtgtttgcatgtgtgtgtgtatatatatatagtatatacatattttttgagacagcatctcactctgtcgcccaggctgaagt

SEQ ID NO: 13798 - DNA, 201 bp, Homo sapiens
tgggtgtgtctatatatgtgtatatgtacgcaaatacgtatatgtgatgtatatatataagatgtgtgtgtgtatatatatgtgtttgcatgtgtgtgtgwatatatatatagtatatacatattttttgagacagcatctcactctgtcgcccaggctgaagttcggtggctgatgacagctcactgcagcctcccggct

SEQ ID NO: 13799 - DNA, 201 bp, Homo sapiens
ctaccacatcctccttcagttagctgccctcggcgtgacagaaacatgtgcaaacagccctgtgcctttgtcttatgttccagccagccaagaaaaatagttgtaaaagagcagctgctgtttggggtaatgaccttggaccctccccaatttgttccaagcctgtttttgtattcatttttcccacatttatgttcctgg

SEQ ID NO: 13800 - DNA, 201 bp, Homo sapiens
ctaataaaataattcttaggtcaggcgcaatggctcaggcctgtaatcccagcaccctgggaggctgaggaaggcagatggcttgagctctggagttcagraccagcgtgggtaacatgacaaaaccccatctctaacaaaaatacaaaaattagccgggcatggtggcatgcacctgtagtcccagctactcgagaggct

SEQ ID NO: 13801 - DNA, 201 bp, Homo sapiens
aggtgggaggatcgcttgagcctgggaggcacaggttgcagtgagccaagatcgcaccactgcactccagcctgggtgacagagtgagaccctgtcaaagaaagagagagagagagagaaaggaaagaaaggaagaaaggaagaaagagaaagagaaagaaagagaaaaagaaagaaagaaggaaagaaagaaagaaaaaa

SEQ ID NO: 13802 - DNA, 201 bp, Homo sapiens
tgggaggatcgcttgagcctgggaggcacaggttgcagtgagccaagatcgcaccactgcactccagcctgggtgacagagtgagaccctgtcaaagaaagagagagagagagagaaaggaaagaaaggaagaaaggaagaaagagaaagagaaagaaagagaaaaagaaagaaagaaggaaagaaagaaagaaaaaagaa

SEQ ID NO: 13803 - DNA, 201 bp, Homo sapiens
agatcgcaccactgcactccagcctgggtgacagagtgagaccctgtcaaagaaagagagagagagagagaaaggaaagaaaggaagaaaggaagaaagaraaagagaaagaaagagaaaaagaaagaaagaaggaaagaaagaaagaaaaaagaaagaaaaagaaagagaaaggagaaaaagaattcttactaataaatg

SEQ ID NO: 13804 - DNA, 201 bp, Homo sapiens
actccagcctgggtgacagagtgagaccctgtcaaagaaagagagagagagagagaaaggaaagaaaggaagaaaggaagaaagagaaagagaaagaaagrgaaaaagaaagaaagaaggaaagaaagaaagaaaaaagaaagaaaaagaaagagaaaggagaaaaagaattcttactaataaatgcaggagaaatgatag

SEQ ID NO: 13805 - DNA, 201 bp, Homo sapiens
aatttaacattttgcttgtaagacttaattttgcctgggtatggtggctcatgcctgtaatcctagcacttcaggaggttgaggcaggaggactgcttgarcccaggagttcaagaccagcctgggcaacacagtgggaccccatcactaccaaaaaaaaaaaaaattagtcaggcatggtggtgtgcacttgtagtccca

SEQ ID NO: 13806 - DNA, 201 bp, Homo sapiens
gaatactgtaattctcattttatggaaatgaaaatctaaatgaatacctctggtaattgtacgggactgtttgattagtatttaccattaattaattaaattttttttttttttgagatggagtctcgttctgttgcccaggctggagtgcagtggcacaatctcggctcacttcaacctccgtctcccaggttcaagcaa

SEQ ID NO: 13807 - DNA, 201 bp, Homo sapiens
tttttttttttgagatggagtctcgttctgttgcccaggctggagtgcagtggcacaatctcggctcacttcaacctccgtctcccaggttcaagcaattstcctgtctcagcctcctgagtagctgggactacaggtgcatgccactacgtctggctaatttttgtatttttagtagggatgggatttcaccatattggt

SEQ ID NO: 13808 - DNA, 201 bp, Homo sapiens
gcactgaatttctctcatttgtagctagttgccctttcaatgttccaaaaaaaaaggctgtaaataacttattttatttattcaattaatttttttttttwaattttttgagatatagtttccctctggtcacccaggctggagtgaaatgatgcaatctcggcttactgcaatttctgcctcccgggttcaagcaattct

SEQ ID NO: 13809 - DNA, 201 bp, Homo sapiens
aatcacttgaacctgggaggcggaggttgcagtgagccgagatggtgccactgcactccagcctgggtgacagagcgagactccatctcaaaaaaaaaaamcccccccacacacaaaacctgttttcttgaatcatggttgttttgttactgataggttcaataagtaaatatatttattgtctgttgtattctttattag

SEQ ID NO: 13810 - DNA, 201 bp, Homo sapiens
tattaggcattataaacacaccgccactttttaatttttatttcattaatgtttccaattttttttttttttttttttaagacagaggctcgctctgtcayccaggctggagtggagtggtgcagtcttaccccactgcaacctccacctcctgggctcagccttgtaaatagctgggactacaggcatgcaccaccatgc

SEQ ID NO: 13811 - DNA, 201 bp, Homo sapiens
tccaaaccagtggcttttccttttaaaaaaatttaaagataatatgtgcaaatcatttttttaaaattcaaacagtatttaagagtttcagtgaaacatgmattttccttctaccctggtacttagttttactccccaagggcaatcactttttactggtttttaaaaatatatccttcctgagatacttatgaatatcca

SEQ ID NO: 13812 - DNA, 201 bp, Homo sapiens
actacaggcgcccgccacccacgcctggctaatttttttgtatttttagtagagacggggtttcaccatgttagccaggatggtctcgatctcctgacctygtgatccacccatctcagcctcccaaagtgctgggattacaggcgtgagccaccgcgcccggccccattttattacctttatttgcttggatccttctta

SEQ ID NO: 13813 - DNA, 201 bp, Homo sapiens
tttagtagagacggggtttcaccatgttagccaggatggtctcgatctcctgacctcgtgatccacccatctcagcctcccaaagtgctgggattacaggygtgagccaccgcgcccggccccattttattacctttatttgcttggatccttcttagcttcttcaatgttaaagatattgacagttttcctcttactgaa

SEQ ID NO: 13814 - DNA, 201 bp, Homo sapiens
aggatggtctcgatctcctgacctcgtgatccacccatctcagcctcccaaagtgctgggattacaggcgtgagccaccgcgcccggccccattttattayctttatttgcttggatccttcttagcttcttcaatgttaaagatattgacagttttcctcttactgaaatttataaatccattgactcccttgatattat

SEQ ID NO: 13815 - DNA, 201 bp, Homo sapiens
tctcagatgctctgccaacgcttcacaccaagtattacaaactaaactcgtcatcttcctcctgaaacctgtctcccaggccaggcgcggtggctcacacytgtaatcccagtactttgggaggccgaggtgggtggatcacctgaggtcaggagttcgagaccagcctggccaacttggtaaaaccccatctctacgaaa

SEQ ID NO: 13816 - DNA, 201 bp, Homo sapiens
tatcttcttcataaactgtctttggctacctcagttagaattccttatcccattttcctgaagcatttctttgactcttctttactgctcccccacccttttttttttttctttgagactgaattttgcttgttgcccaggctggagtgcaattgcccgatctcggctcattgcaacctccgcctcctgggttcaagtgat

SEQ ID NO: 13817 - DNA, 201 bp, Homo sapiens
tttcctgaagcatttctttgactcttctttactgctcccccacccttttttttttttctttgagactgaattttgcttgttgcccaggctggagtgcaatkgcccgatctcggctcattgcaacctccgcctcctgggttcaagtgattctcctgcctcagcctcctgagtagctgggattacagtcatgtgccaccatgc

SEQ ID NO: 13818 - DNA, 201 bp, Homo sapiens
cctcctgggttcaagtgattctcctgcctcagcctcctgagtagctgggattacagtcatgtgccaccatgcccggctaattttgtatttttagtagagayggggtttctccacgttggtcaggctggtcttcaactcccaacctcaagtgatctgcccaccttcgcctcccaaaatgctgggattacaggtgttagccac

SEQ ID NO: 13819 - DNA, 201 bp, Homo sapiens
tctccacgttggtcaggctggtcttcaactcccaacctcaagtgatctgcccaccttcgcctcccaaaatgctgggattacaggtgttagccactgcgccygacccccattttttttttttaaagatgttgaattggtcagggtttgtagttacaagcaacagaagccaactctttaagcagaaaaggaatttgctaaatg

SEQ ID NO: 13820 - DNA, 201 bp, Homo sapiens
attacctcccaaagcaaccccagtactttgggaggatcactttgagcccaggagttccagaccagcccggccaacatggcaaaaccccatctctctaaaastacaaaaaattagctgggcatggtggcacatgcctgtagtcccagctacttggatggctgaggcaggagaatcgcttgaacccgggaggcagaggttgca

SEQ ID NO: 13821 - DNA, 201 bp, Homo sapiens
ttgatacaggatacagtgtgtattagcaaggttttctttttaatgtttatatttatttagttgagatcatactatatatggctctatagattactttctcacttatattactaacttgtgttattaaatattctgcataaagataattttaagatgaaatttgatgttataaaaacttctcattttattaagagattaacg

SEQ ID NO: 13822 - DNA, 201 bp, Homo sapiens
gtgtgtattagcaaggttttctttttaatgtttatatttatttagttgagatcatactatatatggctctatagattactttctcacttatattactaacwtgtgttattaaatattctgcataaagataattttaagatgaaatttgatgttataaaaacttctcattttattaagagattaacgctatgaaacctgctg

SEQ ID NO: 13823 - DNA, 201 bp, Homo sapiens
gcagccacatagcacaggtccccagccagtggactgggaagacagtgtagtcatctctggggaaggggaatgacaagatctggcagtgtggcaggtcccasaaaaaaagggctgggttctgggcagtgagggtgcaggttgagacctgaatactgggtggagccagctgtcagagtccacgcctgcagactggactggtcc

SEQ ID NO: 13824 - DNA, 201 bp, Homo sapiens
gatggtctcgatctcctgacctcgtgatcctcctgcctcggcctcccaaagtgctgggattacaggcgtgagccaccgcgcccggccgcagttcctttttmtagctgtttgaataggaaagatgacttggaaaatgctggattctgagatttatgtgcagccttaaaaagtgtagtttttctctatcaataatgagtgtgg

SEQ ID NO: 13825 - DNA, 201 bp, Homo sapiens
gtataaaaaattagaactatcagctggatgtggtgacttaaacatacttttccagcactttgggaggccaaggcaggaggattgtttgaggccaggagttygagaccagcctgggcaacatagtgagaccccccatctgtaaaaaaaaaaaaaatttaaaaattaactggcttggtggtgtgcgcctgtagttgtagctac

SEQ ID NO: 13826 - DNA, 201 bp, Homo sapiens
aactggcttggtggtgtgcgcctgtagttgtagctactcagggggctgaggtaggaggattccttgagcccaggagtttgaggttgcagtgagctgtgatsgagccactgcactatagcctgggtgacaaaaaaaaaaaagaaaaagaaaaagaattaggtatgtcattaaagaaaggaattgtggtcagatgacagggac

SEQ ID NO: 13827 - DNA, 201 bp, Homo sapiens
atgtgtgtggagacctgtgggaacaggtataaaactggacgcaaggaaacatttaaatttggataataagttaatttattaactgtttttttttggtggcggggggggctctgtcttctgtatctctctaggtggctgtaaatggaaaacatactctgctctatggccacaggatcggcccagagaaaatagacactctgg

SEQ ID NO: 13828 - DNA, 201 bp, Homo sapiens
tttttctggccagacaagagagtagcatttttgtccacgaggcctatccttgccttgtagaactccagagcagccccgtaagatcaggcaacatcttttcttttttttttttgagatggagcctcactgtgtcacccaggctggagtgcagtgtcacaatcccagcacaccacaacctccgcttcctgggtgttcaagcca

SEQ ID NO: 13829 - DNA, 201 bp, Homo sapiens
agaggatcccaggctcctgcagcctgaagtagtcattcagtttagcgttaaaccttccatttctgtccaaccacatctcagcctcaacgctgattttaaagggttttttttttcgtatttttattttgcaagtaacgaattagtggaatgctgactgggtttaaaatttcaacttcacctgcattcccatgtccatgtgga

SEQ ID NO: 13830 - DNA, 201 bp, Homo sapiens
atgtggatacgtgtgtttcatagagttagaatcatagttcaagtctggtcactaacattgctgaaattgccactactctgtcctacttggttaattaaggtttttttttttctttctttctcaaaagctttaatgttgacctactagcaggaaaatcaaaggatattgctctacacttgaacccacgcctgaatattaaag

SEQ ID NO: 13831 - DNA, 201 bp, Homo sapiens
acagaagcttcatcttggccagctgttatcagagtgcaggacttgggctgaaatttcctccccttcctgattttccttgacagtcctttccactgctccthtcaaaagaatggaaaccctcaacttgctgctttgcagattcaggttttgtgcttcattctggcctctcggggtggggccgggttagcagcaaggctgagc

SEQ ID NO: 13832 - DNA, 201 bp, Homo sapiens
aggtgtaaaggtgatgtaaaaggctagtaggttttttggtttttcattgtttgagttttgggcatagatgactgtgaagggcgaacactgccgatggatcdatgaatttgtagtatgtgcaccacttccaacttacgggatacccagctttgacggctttggacaaacacactgaggccaagatgtgctgagcttatcagg

SEQ ID NO: 13833 - DNA, 201 bp, Homo sapiens
ggtgtaaaggtgatgtaaaaggctagtaggttttttggtttttcattgtttgagttttgggcatagatgactgtgaagggcgaacactgccgatggatcaatgaatttgtagtatgtgcaccacttccaacttacgggatacccagctttgacggctttggacaaacacactgaggccaagatgtgctgagcttatcagga

SEQ ID NO: 13834 - DNA, 201 bp, Homo sapiens; identical to SEQ ID NO: 1579

SEQ ID NO: 13835 - DNA, 201 bp, Homo sapiens; identical to SEQ ID NO: 1579

SEQ ID NO: 13836 - DNA, 201 bp, Homo sapiens
gcacattaacaaagcaggaggcgccacggaccgcctccctccacaccgctccttccgccttcattccttgcccacaggcttgcactggaagctgaataagaatccccaaaactcaaacttcctagggatgccacccctttagtagctcacacctcccccctccaagagctaagaaacaaaggagaatgtacttttgtagct

SEQ ID NO: 13837 - DNA, 201 bp, Homo sapiens
aaacctcatccctactaaaaatacaaaaattagccaggtgtggaggcgggcgcctgtgatcccagctattcgggaggctgaggcacaagaattgcttgaamccgggaggtggaggttgcagcgagccgagattgcaccactgcactccagcctgggtgacagagcaagaccctgtctcaaaacaacaaaacaaaactcaaa

SEQ ID NO: 13838 - DNA, 201 bp, Homo sapiens
cctgggctgctttctcacctgttccctcctagcctgaggccgagcgccacctccaagtggaggaatctggggaagtttccttcccggaatttgtagtgacrgtggagtgacctccattgcgttccctgcctctaacacgctctttaggatgccgagtcatttgactgcagtgttaaacattgcaaagcgcaagtcatgtga

SEQ ID NO: 13839 - DNA, 201 bp, Homo sapiens; identical to SEQ ID NO: 13838

SEQ ID NO: 13840 - DNA, 201 bp, Homo sapiens
gggatgggatttcaccatattggtcaggctggtctctaactcctgaacctcaggtgatccacccgccttggcctcccaaagtgctgggattacaggtgtgrgccaccatgcctggcctattttagtatttttaataataaattccatgttagaaattttctactgatgtattttttaagtcaatatttcctacactcacaa

SEQ ID NO: 13841 - DNA, 201 bp, Homo sapiens
tctcctgtctcagcctcctgagtagctgggactacaggtgcatgccactacgtctggctaatttttgtatttttagtagggatgggatttcaccatattgstcaggctggtctctaactcctgaacctcaggtgatccacccgccttggcctcccaaagtgctgggattacaggtgtgagccaccatgcctggcctatttt

SEQ ID NO: 13842 - DNA, 201 bp, Homo sapiens
gccctttcactcagccccgtttgcacctaaatatgacttacaaaagaaacacagcatttatgtgtacttatttcaacttattttagctttgtaaagaagtrcaaggttgactcagggcccagcttggtgtctcatgcctgtaatttcagcattgtgggaggccaaggcaggaagatattgtgagcccaggagtttgagacc

SEQ ID NO: 13843 - DNA, 201 bp, Homo sapiens
gagtagctgggactacaggcgcccaccaccacacccggctaatttttgtatttttagtagagacggggtttcaccgtgttagccaggatggtctcgatctsctgacctcgtgatcctcctgcctcggcctcccaaagtgctgggattacaggcgtgagccaccgcgcccggccgcagttcctttttatagctgtttgaata

SEQ ID NO: 13844 - DNA, 201 bp, Homo sapiens
cgcccaccaccacacccggctaatttttgtatttttagtagagacggggtttcaccgtgttagccaggatggtctcgatctcctgacctcgtgatcctccygcctcggcctcccaaagtgctgggattacaggcgtgagccaccgcgcccggccgcagttcctttttatagctgtttgaataggaaagatgacttggaaaa

SEQ ID NO: 13845 - DNA, 201 bp, Homo sapiens
ggtgactcattgctaaaacagtttgaaattcgtaacacttgggtgtcaaattttgacttccactcaacctacccatgttttatttccactgccaccacttrctcaacaagatcataagcctagtatctataaacaacagaatgtattgctctaactcaaaagactatagtgtggataaattcaatgcatttctctctggag

SEQ ID NO: 13846 - DNA, 201 bp, Homo sapiens
ctcattgctaaaacagtttgaaattcgtaacacttgggtgtcaaattttgacttccactcaacctacccatgttttatttccactgccaccacttactcarcaagatcataagcctagtatctataaacaacagaatgtattgctctaactcaaaagactatagtgtggataaattcaatgcatttctctctggagcacaa

SEQ ID NO: 13847 - DNA, 201 bp, Homo sapiens
gctaaaacaacacttcactgtctgacaacaatgaagtaaaaaattcaccctccttagcttaggacttaagaacctctaaaatcttgcttccaagcactagsttgtgtcttactggtaccttgtataaggcacacagggcaagggtgacagctgaactgaagcgaccacccacctgttttggagatgttcacctggttcaag

SEQ ID NO: 13848 - DNA, 201 bp, Homo sapiens
tgcactccagcctgggtgacagagtgagaccctgtcaaagaaagagagagagagagagaaaggaaagaaaggaagaaaggaagaaagagaaagagaaagaragagaaaaagaaagaaagaaggaaagaaagaaagaaaaaagaaagaaaaagaaagagaaaggagaaaaagaattcttactaataaatgcaggagaaatga

SEQ ID NO: 13849 - DNA, 201 bp, Homo sapiens
tttaaaatactcccagataaaatatttttggaagagtacttggttggattcaacagcttttttttaatttaaaaaaatcacctcaatttttttgcttgctytaacgtgccatagaaattcctgaggttttacttgttgctttacaatgaactgtgtaaacacaagctggaagagatcagctatgcgctggaagggttggtt

SEQ ID NO: 13850 - DNA, 201 bp, Homo sapiens
atgactgtaattgctggaaattgccctgtaatcctgagcagtaaagagcttgttttagttttatgtggtggtgagaatctttaggaatgtctagtttccaygtatctgaagctgaatcctgaatcgaggtctgaaaaaggacagccacttttttagtaaaccgcctagaagattcttgggcaaaaggaagggtgagaatcc

SEQ ID NO: 13851 - DNA, 201 bp, Homo sapiens
aattcttaggtcaggcgcaatggctcaggcctgtaatcccagcaccctgggaggctgaggaaggcagatggcttgagctctggagttcaggaccagcgtgrgtaacatgacaaaaccccatctctaacaaaaatacaaaaattagccgggcatggtggcatgcacctgtagtcccagctactcgagaggctgaggtgggag

SEQ ID NO: 13852 - DNA, 201 bp, Homo sapiens
agattttgttaaatatatctggggtcccttctacctggttggaactgggattcccaccattcttgtggggatagaatctcaggttacacctatttccccartcctctgtagccacagaagcttcatcttggccagctgttatcagagtgcaggacttgggctgaaatttcctccccttcctgattttccttgacagtcctt

SEQ ID NO: 13853 - DNA, 201 bp, Homo sapiens
attgcacaactgcactgcatcctgggcgacagagtgatacttcatctcaaaaaaaaaaaaagaaaaaaaaagttaggcttccttttctgtttttttttttytttctttcttctctttttttttttttttttaagagatggaggcttgctctattgcccatgctggagtgcagtggtgcaatctcggctcactgccaccttt

SEQ ID NO: 13854 - DNA, 201 bp, Homo sapiens
ctatgaatagtatttaccttgtgtctctttccaaagaactcatagtggtttgcagctattgcagatatcctggccatgaggtatgcagttccttttttttkttttgagacggagccttgctctgtcgcccaggctggagcatagtggcgcgatctcggctcactgcaagctccgcctcccgggttcgtgccattctcctgc

SEQ ID NO: 13855 - DNA, 201 bp, Homo sapiens
gttctcattagtttaattcttaatgccttgcactttccggcaatcattcaatcaaaagagtgaaatgaagcacattaacaaagcaggaggcgccacggacygcctccctccacaccgctccttccgccttcattccttgcccacaggcttgcactggaagctgaataagaatccccaaaactcaaacttcctagggatgcc

SEQ ID NO: 13856 - DNA, 201 bp, Homo sapiens
gagcatagtggcgcgatctcggctcactgcaagctccgcctcccgggttcgtgccattctcctgcctcagcctcccgagtagctgggactacaggcgcccrccaccacacccggctaatttttgtatttttagtagagacggggtttcaccgtgttagccaggatggtctcgatctcctgacctcgtgatcctcctgcctc

SEQ ID NO: 13857 - DNA, 201 bp, Homo sapiens
cacttgaacccgggaggtggaggttgtaatgagccaagattgcacaactgcactgcatcctgggcgacagagtgatacttcatctcaaaaaaaaaaaaagraaaaaaaagttaggcttccttttctgtttttttttttttttctttcttctctttttttttttttttttaagagatggaggcttgctctattgcccatgct

SEQ ID NO: 13858 - DNA, 201 bp, Homo sapiens
ctgtaggacggttcccatgaagaggcatctgttgtcaccactggacacagatggtactgtgtctctgctactctaccaatgccactgctgtctctgacccyagatgtagctccctctgaccctggatgcagctccctctgaccctcgatatagctgcccctgaccccggatgtagctgcctttgaccccagatgtagcttt

SEQ ID NO: 13859 - DNA, 201 bp, Homo sapiens
atggatcaggctaacaacatctgaaaccactaactggttttgatgtcataaaaagaaaaacaaccagatattttctgtctcctgatgagttgcaattggarctacatatcacctgtaaagtcttctggccaaaaaattaagcccagccggaccttattaaacctttaaatctaacaattagttttgaagcttttacagatt

SEQ ID NO: 13860 - DNA, 201 bp, Homo sapiens
tcacttgaacccgggaggtggaggttgtaatgagccaagattgcacaactgcactgcatcctgggcgacagagtgatacttcatctcaaaaaaaaaaaaaraaaaaaaaagttaggcttccttttctgtttttttttttttttctttcttctctttttttttttttttttaagagatggaggcttgctctattgcccatgc

SEQ ID NO: 13861 - DNA, 201 bp, Homo sapiens
tctacctccccggctcaagtaatcctcctgcctcagccttctgagtatctgggactacaggcatgagccaccatgcccagccttttcttttcttttctttyttttctttctctctctgtctctctttctttcttttttcctccctttcttctttttttttgatggagtcttgcactatcgccaggctggaatgcagtggtg

SEQ ID NO: 13862 - DNA, 201 bp, Homo sapiens
ctacctccccggctcaagtaatcctcctgcctcagccttctgagtatctgggactacaggcatgagccaccatgcccagccttttcttttcttttctttcytttctttctctctctgtctctctttctttcttttttcctccctttcttctttttttttgatggagtcttgcactatcgccaggctggaatgcagtggtgc

SEQ ID NO: 13863 - DNA, 201 bp, Homo sapiens
agcaagctgtggacagagattctcttgtttagtcctcacaactctgcaaggtgggttttattactctccatttctagataaaggatctcacctaatattayatgggccagtggtcttccagttggggtatgcacaaccctaggggtaggagaggaccctgcctggggtcttcaggtggggaccatcaacctccatttgtac

SEQ ID NO: 13864 - DNA, 201 bp, Homo sapiens
ccagttggggtatgcacaaccctaggggtaggagaggaccctgcctggggtcttcaggtggggaccatcaacctccatttgtactcttttctgaacattgktctgagacagaaagtccctgcaattaaggcattaagctggctctttttctatttctcatttcataattgcccttctcctgctttaccaaaatctttcacc

SEQ ID NO: 13865 - DNA, 201 bp, Homo sapiens
tgtatatgtgtatatatacacgtgtgtgtgtacatatatacatcatatatgtgtgtctatatatgtatatatgggtgtgtctatatatgtgtatatgtacrcaaatacgtatatgtgatgtatatatataagatgtgtgtgtgtatatatatgtgtttgcatgtgtgtgtgtatatatatatagtatatacatattttttg

SEQ ID NO: 13866 - DNA, 201 bp, Homo sapiens
ggaggatcgcttgagcctgggaggcacaggttgcagtgagccaagatcgcaccactgcactccagcctgggtgacagagtgagaccctgtcaaagaaagaragagagagagagaaaggaaagaaaggaagaaaggaagaaagagaaagagaaagaaagagaaaaagaaagaaagaaggaaagaaagaaagaaaaaagaaag

SEQ ID NO: 13867 - DNA, 201 bp, Homo sapiens
ggcacaggttgcagtgagccaagatcgcaccactgcactccagcctgggtgacagagtgagaccctgtcaaagaaagagagagagagagagaaaggaaagraaggaagaaaggaagaaagagaaagagaaagaaagagaaaaagaaagaaagaaggaaagaaagaaagaaaaaagaaagaaaaagaaagagaaaggagaaa

SEQ ID NO: 13868 - DNA, 201 bp, Homo sapiens
cactccagcctgggtgacagagtgagaccctgtcaaagaaagagagagagagagagaaaggaaagaaaggaagaaaggaagaaagagaaagagaaagaaaragaaaaagaaagaaagaaggaaagaaagaaagaaaaaagaaagaaaaagaaagagaaaggagaaaaagaattcttactaataaatgcaggagaaatgata

SEQ ID NO: 13869 - DNA, 201 bp, Homo sapiens
gagcttgctctgtcacctaggctggagggcagtggcgcagtctcagctcactgcaatctccgcctcccaggttcaagcgattctcctgtctcagcctccaragtagctgggactacaggcgcctgccaccgctcctggctaatttttgtatttttagtagagacagggtttcactatgttgtccaggctggtctcgaactc

SEQ ID NO: 13870 - DNA, 201 bp, Homo sapiens
taatttttgtatttttagtagagacagggtttcactatgttgtccaggctggtctcgaactcctgacctcgtgatccatctgcctcggcctcccaaagtgytgggattacaggcataagccaccgcgcccggcccatgtatactatttatacatttttagtatcattttgtctttacattttacataatttcagatacatt

SEQ ID NO: 13871 - DNA, 201 bp, Homo sapiens
gtcactaagattcttttattttatgacaaaaccatagttctagaagcttgtttctcccacctgaaaagactggatttgggacatgatcctgtagaacttcrgaggtaagcctggtgaatcagatcatagggggtctggagggtgaaaaaaaagagtttggtgctcatggatggggctagtattggggtgtaggggagatta

SEQ ID NO: 13872 - DNA, 201 bp, Homo sapiens
ctcccacctgaaaagactggatttgggacatgatcctgtagaacttcggaggtaagcctggtgaatcagatcatagggggtctggagggtgaaaaaaaagrgtttggtgctcatggatggggctagtattggggtgtaggggagattaggtcaaagcaagaggattcaaaggagaaatgaattcctttagattggggaaga

SEQ ID NO: 13873 - DNA, 201 bp, Homo sapiens
cagcataccaaggcagttctttaaagttcttgatactcttttatcatatctaacttgtattccaaaattattgagttggagcacattttcccagcacttarcaccgctatttcatggatggttggagagggggtccaaaaattttacaatcatgttaacaaaagtaacacagcaacaaaacaataagcaaaatcactgcca

SEQ ID NO: 13874 - DNA, 201 bp, Homo sapiens
tgagttggagcacattttcccagcacttagcaccgctatttcatggatggttggagagggggtccaaaaattttacaatcatgttaacaaaagtaacacarcaacaaaacaataagcaaaatcactgccagagtattccttagcttgaaacaatacggttcacgtcgatagaatatggcatctatttctgtttaatcagtt

SEQ ID NO: 13875 - DNA, 201 bp, Homo sapiens
ccaaaaattttacaatcatgttaacaaaagtaacacagcaacaaaacaataagcaaaatcactgccagagtattccttagcttgaaacaatacggttcacrtcgatagaatatggcatctatttctgtttaatcagttaaccctgctaagtagcaagagcttacaattcatgtctaaaatcatgatttttttactagtttt

SEQ ID NO: 13876 - DNA, 201 bp, Homo sapiens
aacaaaacaataagcaaaatcactgccagagtattccttagcttgaaacaatacggttcacgtcgatagaatatggcatctatttctgtttaatcagttamccctgctaagtagcaagagcttacaattcatgtctaaaatcatgatttttttactagttttttaaaaaatgtgggctctatatatataatttaacatttt

SEQ ID NO: 13877 - DNA, 201 bp, Homo sapiens
actgccagagtattccttagcttgaaacaatacggttcacgtcgatagaatatggcatctatttctgtttaatcagttaaccctgctaagtagcaagagcytacaattcatgtctaaaatcatgatttttttactagttttttaaaaaatgtgggctctatatatataatttaacattttgcttgtaagacttaattttgc

SEQ ID NO: 13878 - DNA, 201 bp, Homo sapiens
gaatagcaaagtcgctgtggctgctgcagaaaaagtgagaaggaaagtagtaggagatgaaatcacagtgtgtgaggattcgggcagatcaggaagtgctygtgtaagaactggatctttactcaaagaatgagcaaaaattagtagacggttggccggatgcagtggctcacacctgcaatcccaggttacaggaggccg

SEQ ID NO: 13879 - DNA, 201 bp, Homo sapiens
gtgagcccaggagtttgagaccagcccgggcaacacagtggaccctgtctctacaaaaaaaaatttttaaattagctgggcatagtggtgtgcgtctatartcccagctactcctggggctgaggtgggaggatcacttgagggaaaccctgtctcaaagtggcggggctggggggagactcaggcagaattgtgaagata

SEQ ID NO: 13880 - DNA, 201 bp, Homo sapiens
actgtctggacttggatccgaggcagacgaggaagctgagaaaaccctggcgttgaccccgtggacctgggcgccccgggaaggccagcgcttggtccagrcaggcggggcctgtgcggtgaccaccctggtcctgaaaagtcccagccccgagcgccctccctcctagacctggaggcctggaacagccaggtggacgtc

SEQ ID NO: 13881 - DNA, 201 bp, Homo sapiens
ctcctagacctggaggcctggaacagccaggtggacgtcggcccacctttcttttctttccttcccattttcctaccacctcccaccccactccgccttcsgggcaaaggcagccagatccacccaggacacattctttgtccttatccctctgtgctcgtcccacagcaagccagtcgcggtccaaggctccagaggctg

SEQ ID NO: 13882 - DNA, 201 bp, Homo sapiens
tctttgtccttatccctctgtgctcgtcccacagcaagccagtcgcggtccaaggctccagaggctgtgcaggaggccgagctgggtggcgatcagcggckggtccctgtccaaaacccagcagagccgccagggacgccccagacacagaaggcggggcgcggggagggtggggagaccacagcagtgaggcgcgcgagc

SEQ ID NO: 13883 - DNA, 201 bp, Homo sapiens
gcggcgggtccctgtccaaaacccagcagagccgccagggacgccccagacacagaaggcggggcgcggggagggtggggagaccacagcagtgaggcgcrcgagccgggaagtgaacgaggactgactcctgtcgcttcccgtagccgcccacggacgccagagccgggaaccctgacggcacttagctgctgacaaaca

SEQ ID NO: 13884 - DNA, 201 bp, Homo sapiens
tattatttttttaagcaacagagaaaaccgtatcttaatagtattaaaagtattggatttttccctactttgatttgtttaaattggaggaggaagagcarttctttctattcacaataataatagctaacatagcgcttactctttcgctgttttattaactcaatcctcagaacaaaccaatgatgtgaatactgtaat

SEQ ID NO: 13885 - DNA, 201 bp, Homo sapiens
ttcaatgttccaaaaaaaaaggctgtaaataacttattttatttattcaattaattttttttttttaattttttgagatatagtttccctctggtcacccrggctggagtgaaatgatgcaatctcggcttactgcaatttctgcctcccgggttcaagcaattctagtgcctcagcctcctgagtagctgggactgcagg

SEQ ID NO: 13886 - DNA, 201 bp, Homo sapiens
cagcactttgggaggccgaggcaggtggatcacgaggtcaggagttcaagaccagcctggccaagatggcgaaactccgtctctacttaaaaatacaaaamttagccaggcgtgatggcagcctcctgtaatcccagctactcgggaggctgaggcaagagaatcacttgaacctgggaggcggaggttgcagtgagccga

SEQ ID NO: 13887 - DNA, 201 bp, Homo sapiens
taatgtttccaattttttttttttttttttttaagacagaggctcgctctgtcacccaggctggagtggagtggtgcagtcttaccccactgcaacctccrcctcctgggctcagccttgtaaatagctgggactacaggcatgcaccaccatgcctggctaatttttgtattttttttggtaaagacagagttttgccat

SEQ ID NO: 13888 - DNA, 201 bp, Homo sapiens
gtgtctctgctactctaccaatgccactgctgtctctgaccccagatgtagctccctctgaccctggatgcagctccctctgaccctcgatatagctgccyctgaccccggatgtagctgcctttgaccccagatgtagctttctccaaacccagatatagcggctgcccccttgccagagtgaatactgcgtcattgtgg

SEQ ID NO: 13889 - DNA, 201 bp, Homo sapiens
gaggcaggagaatcgcttgaacccgggaggcagaggttgcagtgagctgagatcacgccactgcactctagcctgggggacagagtgagactctgtctcamaaaaaaaaaaaaaaaaaaaaaagtgatgggaatagattgttttgtctcaaaaagctctttccaacactaaaatgaaacatataattaaaaatatttttct

SEQ ID NO: 13890 - DNA, 201 bp, Homo sapiens
aggcaggagaatcgcttgaacccgggaggcagaggttgcagtgagctgagatcacgccactgcactctagcctgggggacagagtgagactctgtctcaamaaaaaaaaaaaaaaaaaaaaagtgatgggaatagattgttttgtctcaaaaagctctttccaacactaaaatgaaacatataattaaaaatatttttctg

SEQ ID NO: 13891 - DNA, 201 bp, Homo sapiens
cctgctcctagcaattgccatgacaacaaatagataattggcttccgtaatttctcatcttattgcctaaggcaacagagagcttgtgggctcagcttgcrgttcagcagctgctttgttgcctctcctctgtatgtgtgaggcctgccagagcccactttccagacaggtgagagttcattcattcaccatgcagttacc

SEQ ID NO: 13892 - DNA, 201 bp, Homo sapiens
gtatgcagttcctttttttttttttgagacggagccttgctctgtcgcccaggctggagcatagtggcgcgatctcggctcactgcaagctccgcctcccrggttcgtgccattctcctgcctcagcctcccgagtagctgggactacaggcgcccaccaccacacccggctaatttttgtatttttagtagagacggggt

SEQ ID NO: 13893 - DNA, 201 bp, Homo sapiens
ttcacatttgtgagcccagccttatatttcctacacctgagatatagtttgtttggctttgtagtttttctccataaaaggaccaggaaggcacctaaatrtgaggtatggcaccactactctccagccagttgttgccatgcagaaatatggtccactgtgaccagatctttttattagatcctatttctcctagcaggg

SEQ ID NO: 13894 - DNA, 201 bp, Homo sapiens
tttttctccataaaaggaccaggaaggcacctaaatgtgaggtatggcaccactactctccagccagttgttgccatgcagaaatatggtccactgtgacyagatctttttattagatcctatttctcctagcagggctgagttccgaattgacacagtattatgttcatgatgggagggtaagttataatataaccgcca

SEQ ID NO: 13895 - DNA, 201 bp, Homo sapiens
gggctgagttccgaattgacacagtattatgttcatgatgggagggtaagttataatataaccgccaccacccgaagagctaacaagggcaatcccagcgwagaaatcagaagggttttgtaaattcaagtcttgccacaagacagttccgtaggatcatgagattttagacccagaggagatcctagaaatccttgatgt

SEQ ID NO: 13896 - DNA, 201 bp, Homo sapiens
taacctgtatccacaatagaggcccaaagcagccccctctgcatttgtgtgccgtccctggacggattcgagagtcaaccaggcctgcctctgagccattyctgtgtatttcctcagcacctccctgcttggctgcttccccttcaggcagaacacagtactgcctcagaccccaggcacagggggccttcctggcgtgtt

SEQ ID NO: 13897 - DNA, 201 bp, Homo sapiens
gaagagagaaatattacctctttcccatttagtcctgggatgtactttgaggtgaggttacagtttttgaaaatgggacagcaataagaatcctgggagcrggggtgggataagtggtccatttaaatcaagtcctaactcagtatgtggaagttgtgtatgttttttgtttacttggagattgtaatttgccccttttta

SEQ ID NO: 13898 - DNA, 201 bp, Homo sapiens; identical to SEQ ID NO: 1570

SEQ ID NO: 13899 - DNA, 201 bp, Homo sapiens; identical to SEQ ID NO: 1578

SEQ ID NO: 13900 - DNA, 201 bp, Homo sapiens; identical to SEQ ID NO: 1581

SEQ ID NO: 13901 - DNA, 201 bp, Homo sapiens; identical to SEQ ID NO: 1581

SEQ ID NO: 13902 - DNA, 201 bp, Homo sapiens; identical to SEQ ID NO: 1582

SEQ ID NO: 13903 - DNA, 201 bp, Homo sapiens; identical to SEQ ID NO: 1582

SEQ ID NO: 13904 - DNA, 201 bp, Homo sapiens
agtacaggtaactaattgactccctctgctgccaacttggttttccttctgagctatagcatcaggctgtgtgttttgtgttttcttgagattttgttaartatatctggggtcccttctacctggttggaactgggattcccaccattcttgtggggatagaatctcaggttacacctatttccccaatcctctgtagcc

SEQ ID NO: 13905 - DNA, 201 bp, Homo sapiens
ccactgcagatcttcgctgacaaacacacacttacagagaggcttcatgatgaggtactagtgtttggaaaatgcttagcactttttaactacacacagarttccttttaaagtcagccctaaacgtcagtggataaaactgggcagacacctcttgcccaacttgcgatcagggacgaaggccgatggtagacgcagacg

SEQ ID NO: 13906 - DNA, 201 bp, Homo sapiens
ccattggggtggggatagggcattgctattctttacaaatagcctgtaagtaaaaaacaaaattttcttaggcacaaatttctgcctaatacaaaagaccrgacctctagtactggatgacaaatagcaatgttcttccctgccagtttactagggggcctacatctgtgaccacctgcaggctgtttaggctatgcagtg

SEQ ID NO: 13907 - DNA, 201 bp, Homo sapiens
aatctttgttatttaaaagtatttagaaagtattttagtacttctgcccaacgcaccattggggtggggatagggcattgctattctttacaaatagcctrtaagtaaaaaacaaaattttcttaggcacaaatttctgcctaatacaaaagaccggacctctagtactggatgacaaatagcaatgttcttccctgccag

SEQ ID NO: 13908 - DNA, 201 bp, Homo sapiens
atcattgggcacattttcacagaattttactgaattattccttaattgtttaatggttgggaatagtttgggaattaccttccatcaactctgctaagaarggaatggattctggtagcaagacaatataattctcctttagtttttcagccagtgctaacacagtaatcaaagcagcaaatcgaacctgaaagggataaa

SEQ ID NO: 13909 - DNA, 201 bp, Homo sapiens
gagataaaatgttgtggtttttaagtgagataatccaagtaaagcacctaacatggagtagtgaatgaacatcggttgctactaaaagtggacatcctacygcatccttaatgccactaggcatttccatacaatctggggaccaaaacttcaatcatataaatgtatgaggttaattaaaaacactactgtaatctgctt

SEQ ID NO: 13910 - DNA, 201 bp, Homo sapiens; identical to SEQ ID NO: 1585

SEQ ID NO: 13911 - DNA, 201 bp, Homo sapiens; identical to SEQ ID NO: 1585

SEQ ID NO: 13912 - DNA, 201 bp, Homo sapiens; identical to SEQ ID NO: 1583

SEQ ID NO: 13913 - DNA, 201 bp, Homo sapiens; identical to SEQ ID NO: 1583

SEQ ID NO: 13914 - DNA, 201 bp, Homo sapiens; identical to SEQ ID NO: 1580

SEQ ID NO: 13915 - DNA, 201 bp, Homo sapiens; identical to SEQ ID NO: 1580

SEQ ID NO: 13916 - DNA, 201 bp, Homo sapiens; identical to SEQ ID NO: 1576

SEQ ID NO: 13917 - DNA, 201 bp, Homo sapiens; identical to SEQ ID NO: 1575

SEQ ID NO: 13918 - DNA, 201 bp, Homo sapiens; identical to SEQ ID NO: 1574

SEQ ID NO: 13919 - DNA, 201 bp, Homo sapiens; identical to SEQ ID NO: 1573

SEQ ID NO: 13920 - DNA, 201 bp, Homo sapiens; identical to SEQ ID NO: 1572

SEQ ID NO: 13921 - DNA, 201 bp, Homo sapiens; identical to SEQ ID NO: 1569

SEQ ID NO: 13922 - DNA, 201 bp, Homo sapiens; identical to SEQ ID NO: 1568

SEQ ID NO: 13923 - DNA, 201 bp, Homo sapiens
aatggtttactctgacaccgttagcatgtaacaaacacaaaattttaaactaaggggaaccactaatggcatgtatcctttcctttcagatgataatttaytgtgatgttagagaattcaaggttgcagtaaatggcgtacacagcctggagtacaaacacagatttaaagagctcagcagtattgacacgctggaaatta

SEQ ID NO: 13924 - DNA, 201 bp, Homo sapiens
agtgggtggaaacccagcctggcactggcagcgtggcaccagaagtatgaagtgtaggtgtaaaggtgatgtaaaaggctagtaggttttttggtttttcrttgtttgagttttgggcatagatgactgtgaagggcgaacactgccgatggatcaatgaatttgtagtatgtgcaccacttccaacttacgggataccca

SEQ ID NO: 13925 - DNA, 201 bp, Homo sapiens
cctccccttcctgattttccttgacagtcctttccactgctcctatcaaaagaatggaaaccctcaacttgctgctttgcagattcaggttttgtgcttcwttctggcctctcggggtggggccgggttagcagcaaggctgagctgcccctctttcttctgaagccttcatgggggcgaggagcacagggagagctcagt

SEQ ID NO: 13926 - DNA, 201 bp, Homo sapiens
aatactttgataaatgaaaaatggggacgggaagagatcacctatgacacgcctttcaaaagagaaaagtcttttgagatcgtgattatggtgctgaaggmcaaattccaggtaggttttggagagggacaggttgagtcctcattagtgagcaggagtgcacaggggtgcttttcacatttgtgagcccagccttatatt

SEQ ID NO: 13927 - DNA, 201 bp, Homo sapiens
cctgctggtcctttactggtggctttcctttctgagcactcatggggcccctgtgtcttccctcatatagattccaggtggatctgcagaatggcagcagyatgaaacctcgagccgatgtggcctttcatttcaatcctcgtttcaaaagggccggctgcattgtttgcaatactttgataaatgaaaaatggggacggg

SEQ ID NO: 13928 - DNA, 201 bp, Homo sapiens
ggctgactcagcagcccagggagcttgaagaaggctccacagaggaggctgtgcctcaaggcgatttcggtttaggagccaccaatttataaccacttttstgtggcccgtcttattttatttcttatttcttgacaatcagaagtaccttgggtaggttttaccatgcacatcgtaatttgagtgagcttagtgtgaggc

SEQ ID NO: 13929 - DNA, 201 bp, Homo sapiens
aggcctgccagagcccactttccagacaggtgagagttcattcattcaccatgcagttaccgatcgtctcttgacctgtgtcctggggaggtaaaggtgaygagccagttctgccccatgcagctcacagtctaggcaaagctacatgcaaacaaacagaatccaaagtgctatcatgaaccctctgagaggggctgactc

SEQ ID NO: 13930 - DNA, 201 bp, Homo sapiens
tgactcttaggcttctttcaagctgcagtctgcctaatagagagccttgcatttaatcatcaaaaaggcaaagcaatattaatcagcaagggtgttttggsaaataacagcaaacctgactgtggcgtaagcttgtggtattgtctccagtgtgatcagatctgtattttaattttttaaatgtaaattaataatgatctg

SEQ ID NO: 13931 - DNA, 201 bp, Homo sapiens
ctgttatgtttcctgggtgtctgactcttaggcttctttcaagctgcagtctgcctaatagagagccttgcatttaatcatcaaaaaggcaaagcaatatkaatcagcaagggtgttttggcaaataacagcaaacctgactgtggcgtaagcttgtggtattgtctccagtgtgatcagatctgtattttaattttttaa

SEQ ID NO: 13932 - DNA, 201 bp, Homo sapiens
gcagtctagatgaggtctaatgttcataagctaggggattttcagatatggaaagggataccaattttcaacagccacatagagtatcacattttcactcyatgtttcctgggtgtctgttatgtttcctgggtgtctgactcttaggcttctttcaagctgcagtctgcctaatagagagccttgcatttaatcatcaaa

SEQ ID NO: 13933 - DNA, 201 bp, Homo sapiens
ttgtcacctgctcttaccttgttgcagtctagatgaggtctaatgttcataagctaggggattttcagatatggaaagggataccaattttcaacagccamatagagtatcacattttcactctatgtttcctgggtgtctgttatgtttcctgggtgtctgactcttaggcttctttcaagctgcagtctgcctaataga

SEQ ID NO: 13934 - DNA, 201 bp, Homo sapiens
ggcagttttgtcacctgctcttaccttgttgcagtctagatgaggtctaatgttcataagctaggggattttcagatatggaaagggataccaattttcarcagccacatagagtatcacattttcactctatgtttcctgggtgtctgttatgtttcctgggtgtctgactcttaggcttctttcaagctgcagtctgcc

SEQ ID NO: 13935 - DNA, 201 bp, Homo sapiens
tgttttctccccagctttgtcatgtatttagtggccttatgtagacagtttcctttgaaacatctcttggacttctctgctcttccagggccattgccacygacctggaatgtgtccttatcgtttcacgccaggcttatggcagcagtcagtcacccagatgacctcctgacctctggcttatttcacccccactggact

SEQ ID NO: 13936 - DNA, 201 bp, Homo sapiens
ccccagaaggaaagcaggtgtttagcataaccatattatttgcatgaacagttcaggtacaggaaatccccgttaccagttaggttggtgggtgcccttcycaaatcccaagttcccagacaccagccaggggcctgcctcgtaaggaggcctttccaggacagcagtcaggcctgccaatgttaattcttttctgcatac

SEQ ID NO: 13937 - DNA, 201 bp, Homo sapiens
cttccatgtttatccttttctgcttagtattctaagtactccttttttaccttacaatttagtcttaaaacacaacacagtcaagtctttcttttgtaacytgtgagataccttctagcctttgtgctgtttttcttctctttttgctgcctgccttcctgactgagagtggatttcctcactaaggctctgccctctgat

SEQ ID NO: 13938 - DNA, 201 bp, Homo sapiens
ctctttcgctgttttattaactcaatcctcagaacaaaccaatgatgtgaatactgtaattctcattttatggaaatgaaaatctaaatgaatacctctgrtaattgtacgggactgtttgattagtatttaccattaattaattaaattttttttttttttgagatggagtctcgttctgttgcccaggctggagtgcag

SEQ ID NO: 13939 - DNA, 201 bp, Homo sapiens
agctaacatagcgcttactctttcgctgttttattaactcaatcctcagaacaaaccaatgatgtgaatactgtaattctcattttatggaaatgaaaatytaaatgaatacctctggtaattgtacgggactgtttgattagtatttaccattaattaattaaattttttttttttttgagatggagtctcgttctgttg

SEQ ID NO: 13940 - DNA, 201 bp, Homo sapiens
atttcagcattgtgggaggccaaggcaggaagatattgtgagcccaggagtttgagaccagcccgggcaacacagtggaccctgtctctacaaaaaaaaawttttaaattagctgggcatagtggtgtgcgtctatagtcccagctactcctggggctgaggtgggaggatcacttgagggaaaccctgtctcaaagtggc

SEQ ID NO: 13941 - DNA, 201 bp, Homo sapiens
aattattgagttggagcacattttcccagcacttagcaccgctatttcatggatggttggagagggggtccaaaaattttacaatcatgttaacaaaagtracacagcaacaaaacaataagcaaaatcactgccagagtattccttagcttgaaacaatacggttcacgtcgatagaatatggcatctatttctgtttaa

SEQ ID NO: 13942 - DNA, 201 bp, Homo sapiens
taacttgtattccaaaattattgagttggagcacattttcccagcacttagcaccgctatttcatggatggttggagagggggtccaaaaattttacaatyatgttaacaaaagtaacacagcaacaaaacaataagcaaaatcactgccagagtattccttagcttgaaacaatacggttcacgtcgatagaatatggca

SEQ ID NO: 13943 - DNA, 201 bp, Homo sapiens
agcagggtatgtgttctcggcgctcacaaatgtataatccattgtggcaaatttttgctttcacatatttttttttatcattattgtcacaggttctgtgrcggagttctggtttctaaattcacagcataccaaggcagttctttaaagttcttgatactcttttatcatatctaacttgtattccaaaattattgagtt

SEQ ID NO: 13944 - DNA, 201 bp, Homo sapiens
atggggctagtattggggtgtaggggagattaggtcaaagcaagaggattcaaaggagaaatgaattcctttagattggggaagataatcggaagaggtaraagacaccgtccatgacacttcctggggaagcagatgtatgtataaggatgtgagtattgtggttttgtaaagaatgcattcctgaagatgttgcataat

SEQ ID NO: 13945 - DNA, 201 bp, Homo sapiens
agggtgaaaaaaaagagtttggtgctcatggatggggctagtattggggtgtaggggagattaggtcaaagcaagaggattcaaaggagaaatgaattccyttagattggggaagataatcggaagaggtagaagacaccgtccatgacacttcctggggaagcagatgtatgtataaggatgtgagtattgtggttttgt

SEQ ID NO: 13946 - DNA, 201 bp, Homo sapiens
attttagacccagaggagatcctagaaatccttgatgtcagttccatctctggcttcatggagtgtcttgtacctagcgtgtatgtgtacggttgaatttrgtcccagaagcttacacctgctggccctctggcctgtggagcttgcccacagtagaggtatgtaccaacgcgagagaagactcgaatgcctctggcgcag

SEQ ID NO: 13947 - DNA, 201 bp, Homo sapiens
gttataatataaccgccaccacccgaagagctaacaagggcaatcccagcgaagaaatcagaagggttttgtaaattcaagtcttgccacaagacagttcygtaggatcatgagattttagacccagaggagatcctagaaatccttgatgtcagttccatctctggcttcatggagtgtcttgtacctagcgtgtatgtg

SEQ ID NO: 13948 - DNA, 201 bp, Homo sapiens
agggctgagttccgaattgacacagtattatgttcatgatgggagggtaagttataatataaccgccaccacccgaagagctaacaagggcaatcccagcraagaaatcagaagggttttgtaaattcaagtcttgccacaagacagttccgtaggatcatgagattttagacccagaggagatcctagaaatccttgatg

SEQ ID NO: 13949 - DNA, 201 bp, Homo sapiens
tttttggtggcggggggggctctgtcttctgtatctctctaggtggctgtaaatggaaaacatactctgctctatggccacaggatcggcccagagaaaayagacactctgggcatttatggcaaagtgaatattcactcaattggttttagcttcagctcggtgagtgaccttccacagcttggggtcttttatgaggat

SEQ ID NO: 13950 - DNA, 201 bp, Homo sapiens
atgcagtgaaaagatgcagtttcagtacttgtcacgcagttcctaaccttaggcgaggagtctctcgtctttagcagaatctggtagttcagtggtttccraagagagtcatccgccatggccaccgaaaactgtgcgatgcatggtatcaggtgctttgtcacccgttcctggaatttctcttctcccccaagcctgttt

SEQ ID NO: 13951 - DNA, 201 bp, Homo sapiens
aaaagaccggacctctagtactggatgacaaatagcaatgttcttccctgccagtttactagggggcctacatctgtgaccacctgcaggctgtttaggcyatgcagtgaaaagatgcagtttcagtacttgtcacgcagttcctaaccttaggcgaggagtctctcgtctttagcagaatctggtagttcagtggtttcc

SEQ ID NO: 13952 - DNA, 100 bp, Homo sapiens
taaggaataattcagtaaaattctgtgaaaatgtgcccaatgataatgcrgatttggatataacgtgactagcagttgatccagtcctcatacaggcagc

SEQ ID NO: 13953 - DNA, 100 bp, Homo sapiens
gggaaagctgtagaaggcaagaagactcgagaatcccccagagttatttktctccataaagaccatcagagtgcttaactgagctgttggagactgtgag

SEQ ID NO: 13954 - DNA, 100 bp, Homo sapiens; identical to SEQ ID NO: 13953

SEQ ID NO: 13955 - DNA, 201 bp, Homo sapiens
aaacgtaaattgatgcataaacttaattttagaactggaaggaaatctggagttctttaggagccaggttttacacatgcagaaacctaacagcttcagtytcgattcgataaaatttgactaactaaacttaagataagcatagttacgcattagagtattaactctcaaacttttaaaaaagaattcttcctttgcttg

SEQ ID NO: 13956 - DNA, 201 bp, Homo sapiens
gtctcctgatgagttgcaattggagctacatatcacctgtaaagtcttctggccaaaaaattaagcccagccggaccttattaaacctttaaatctaacarttagttttgaagcttttacagattaaatgaagtctgagatttgcttcaaaatgaaccagtggtggggaggaagtgggtgaggtgtaggtgaaacaagatt

SEQ ID NO: 13957 - DNA, 201 bp, Homo sapiens
gctggtgtgtttacagccaataggtcaaactatcagtcagtgtagggccctgagaagtcgggtatttaagagcatctaataggcacagaattgtgctccayactgcttaaactgttccctaagtgtccaatttggagaaaacacccacacgcaggataactggcgagtgacgcggagtggctgcgagtccaagttatcact

SEQ ID NO: 13958 - DNA, 201 bp, Homo sapiens
cttgacctgtgtcctggggaggtaaaggtgatgagccagttctgccccatgcagctcacagtctaggcaaagctacatgcaaacaaacagaatccaaagtrctatcatgaaccctctgagaggggctgactcagcagcccagggagcttgaagaaggctccacagaggaggctgtgcctcaaggcgatttcggtttaggag

SEQ ID NO: 13959 - DNA, 201 bp, Homo sapiens
cgagccactgcactatagcctgggtgacaaaaaaaaaaaagaaaaagaaaaagaattaggtatgtcattaaagaaaggaattgtggtcagatgacagggasagtctagttttagtctgacattcccacagcattacagatctagttcagatggttttactgaatacctgctttggatacaagctgtggtatcattagtgtt

SEQ ID NO: 13960 - DNA, 201 bp, Homo sapiens
attaaagaaaggaattgtggtcagatgacagggacagtctagttttagtctgacattcccacagcattacagatctagttcagatggttttactgaatacytgctttggatacaagctgtggtatcattagtgttgggctcagctctgtgtacctaacacctgaagagcagtggtttaagatgtgaaaattaagtctcaag

SEQ ID NO: 13961 - DNA, 201 bp, Homo sapiens
ggcaccactactctccagccagttgttgccatgcagaaatatggtccactgtgaccagatctttttattagatcctatttctcctagcagggctgagttcygaattgacacagtattatgttcatgatgggagggtaagttataatataaccgccaccacccgaagagctaacaagggcaatcccagcgaagaaatcagaa

SEQ ID NO: 13962 - DNA, 201 bp, Homo sapiens
taacaagggcaatcccagcgaagaaatcagaagggttttgtaaattcaagtcttgccacaagacagttccgtaggatcatgagattttagacccagaggasatcctagaaatccttgatgtcagttccatctctggcttcatggagtgtcttgtacctagcgtgtatgtgtacggttgaatttggtcccagaagcttacac

SEQ ID NO: 13963 - DNA, 201 bp, Homo sapiens
ataaataccactggcccctagcgtgttgacaggaaaccgctgacgtgcaatacaaaaattctgctttgcaagatgccttaggattatacctctcacagtakaaacagggcccatcaatttccacaagtaataaaaggcggctctaccagcccaactccaaagatctcacagaagaaaaaaaagccagaatacattccgcac

SEQ ID NO: 13964 - DNA, 201 bp, Homo sapiens
ccaagaaactaaaagttaagaagggcctatctggactatttttcaaaatatgaagattttactctttttaaagtttacacattttagctaacaatggccaygatcagaacttataaaatcctgcgggtatacgtaaatgtgaaaaagatataattcatttagtaaatcctataatgagaagccctctaaaatttggaggac

SEQ ID NO: 13965 - DNA, 201 bp, Homo sapiens
ctgagaaccagtatagttcaggtcatcatacttcacaaaagacaccaagaaactaaaagttaagaagggcctatctggactatttttcaaaatatgaagaytttactctttttaaagtttacacattttagctaacaatggccatgatcagaacttataaaatcctgcgggtatacgtaaatgtgaaaaagatataattca

SEQ ID NO: 13966 - DNA, 201 bp, Homo sapiens
gactctgtacaagcagtacagagtaataacttagaaggaaaataatccaaagccagatttacaatgtaacgtctccagtgagggatttgattaactcaacrtgctgctacaggcgaaaacatgctcatgacctcgagaaaggtattaaaagtaaagcaatataaaataacctgttatctacatatgtataataaaacactc

SEQ ID NO: 13967 - DNA, 201 bp, Homo sapiens
gcaataccaatggaaaactgaagttcttccatcttgctatttacagtcaaaatgacatatatgactcagaggccactgtcaaaggacagtaaacatttaayaccaaattggaaaacagaaatagttatctctaaataaaatatatgtacctttttgaaaacccacaagtttagcagaaaataactattttaataaattgct

SEQ ID NO: 13968 - DNA, 201 bp, Homo sapiens; identical to SEQ ID NO: 13610

SEQ ID NO: 13969 - DNA, 201 bp, Homo sapiens; identical to SEQ ID NO: 13611

SEQ ID NO: 13970 - DNA, 201 bp, Homo sapiens; identical to SEQ ID NO: 13612

SEQ ID NO: 13971 - DNA, 201 bp, Homo sapiens; identical to SEQ ID NO: 13612

SEQ ID NO: 13972 - DNA, 201 bp, Homo sapiens; identical to SEQ ID NO: 13614

SEQ ID NO: 13973 - DNA, 201 bp, Homo sapiens
acctcaaaacatgtcaaatgtaaacagctgaaacatgtcctttagtaatactatgaaagacagtagtaggctggagggatacacatctatgtaatattaamattatttaaagcctaaaagatctatttttagtaaacaattgaatgaaatagtattttgttcaagcactaacacaccaagtgaattcttcatcgctagagg

SEQ ID NO: 13974 - DNA, 201 bp, Homo sapiens
aatccttacatatagcagatattaaaaaaaaagtcttgctacctcaaaacatgtcaaatgtaaacagctgaaacatgtcctttagtaatactatgaaagayagtagtaggctggagggatacacatctatgtaatattaaaattatttaaagcctaaaagatctatttttagtaaacaattgaatgaaatagtattttgtt

SEQ ID NO: 13975 - DNA, 201 bp, Homo sapiens
tggaggacaaataaaaacaaaatccttacatatagcagatattaaaaaaaaagtcttgctacctcaaaacatgtcaaatgtaaacagctgaaacatgtccyttagtaatactatgaaagacagtagtaggctggagggatacacatctatgtaatattaaaattatttaaagcctaaaagatctatttttagtaaacaatt

SEQ ID NO: 13976 - DNA, 201 bp, Homo sapiens
gcactgttttcacactgcagtttagtggatttgaaaggctagaaccataggtccataaaacagaacagaacttgaataactgaaaaacatcttctagatgmacctaattaaaaaaaaaaaaaagcaaacttttaattcttactcaaataagctggttccaaatcctcttctcactagtgtacaattataaagaaacaaata

SEQ ID NO: 13977 - DNA, 201 bp, Homo sapiens
ggagtgcagtggtgcaatcacagctcactgcagccttgacctcccaggcacaagccatctgcctacctcaggcaactgagtagctgggactacaggcacgyaccatcacgcccagctaatttttgtattttttgtagaggcaggatctcatcacgttgtccaagctggtcttgaactcttggcctcaagtgatcctcctgc

SEQ ID NO: 13978 - DNA, 201 bp, Homo sapiens
tgtttggtgagattttgctagtgccagtaacttaaaagcaatacttagaagtgaccagaaatatgtatagatgtacagcccttttttttttttttttgagmcagggtcttgctctgttgcccagtttggagtgcagtggtgcaatcacagctcactgcagccttgacctcccaggcacaagccatctgcctacctcaggca

SEQ ID NO: 13979 - DNA, 201 bp, Homo sapiens
ctggatctcctgagctcaaagagatcctcctgccccagcctccgaagaagctgggacatcccaggaccccaccaccactttttaaaaatttttgtagagayggggttttgctatgttgaccgggctgttctcaaactcctggcctcaaataatcccacctcagcctcccaaagtgctggtgttacaggtgcatgccaccac

SEQ ID NO: 13980 - DNA, 201 bp, Homo sapiens
gggccccaagaaattgccagaagaattttatttatttttttagagacagggtctttctccatggcccaggctgaagtgcagtgatgtgatcatatctcacygcagcctggatctcctgagctcaaagagatcctcctgccccagcctccgaagaagctgggacatcccaggaccccaccaccactttttaaaaatttttgt

SEQ ID NO: 13981 - DNA, 201 bp, Homo sapiens
cacaaaacaagtttaggtgaacaagataaggcttttagatgggccccaagaaattgccagaagaattttatttatttttttagagacagggtctttctccrtggcccaggctgaagtgcagtgatgtgatcatatctcaccgcagcctggatctcctgagctcaaagagatcctcctgccccagcctccgaagaagctggg

SEQ ID NO: 13982 - DNA, 201 bp, Homo sapiens
ttttctctcattgtttaaacaagtttaatacacaaacagagatgtatacaaatcatacatgcagaactcactatatccaggtaaagaaaggctgggcatgrtggctcatgcctgtaatcccagcactatgggaactcgagttgggaggatcgcttgaggccaggaatttgacatcagcctgggtaatagagcgagaccctg

SEQ ID NO: 13983 - DNA, 201 bp, Homo sapiens; identical to SEQ ID NO: 13622

SEQ ID NO: 13984 - DNA, 201 bp, Homo sapiens; identical to SEQ ID NO: 13623

SEQ ID NO: 13985 - DNA, 201 bp, Homo sapiens; identical to SEQ ID NO: 13624

SEQ ID NO: 13986 - DNA, 201 bp, Homo sapiens; identical to SEQ ID NO: 13625

SEQ ID NO: 13987 - DNA, 201 bp, Homo sapiens; identical to SEQ ID NO: 13642

SEQ ID NO: 13988 - DNA, 201 bp, Homo sapiens; identical to SEQ ID NO: 13643

SEQ ID NO: 13989 - DNA, 201 bp, Homo sapiens; identical to SEQ ID NO: 13644

SEQ ID NO: 13990 - DNA, 201 bp, Homo sapiens; identical to SEQ ID NO: 13645

SEQ ID NO: 13991 - DNA, 201 bp, Homo sapiens; identical to SEQ ID NO: 13646

SEQ ID NO: 13992 - DNA, 201 bp, Homo sapiens; identical to SEQ ID NO: 13647

SEQ ID NO: 13993 - DNA, 201 bp, Homo sapiens; identical to SEQ ID NO: 13648

SEQ ID NO: 13994 - DNA, 201 bp, Homo sapiens; identical to SEQ ID NO: 13649

SEQ ID NO: 13995 - DNA, 201 bp, Homo sapiens; identical to SEQ ID NO: 13650

SEQ ID NO: 13996 - DNA, 201 bp, Homo sapiens; identical to SEQ ID NO: 13651

SEQ ID NO: 13997 - DNA, 201 bp, Homo sapiens; identical to SEQ ID NO: 1584

SEQ ID NO: 13998 - DNA, 201 bp, Homo sapiens; identical to SEQ ID NO: 1584

SEQ ID NO: 13999 - DNA, 201 bp, Homo sapiens; identical to SEQ ID NO: 1586

SEQ ID NO: 14000 - DNA, 201 bp, Homo sapiens; identical to SEQ ID NO: 1586

SEQ ID NO: 14001 - DNA, 201 bp, Homo sapiens; identical to SEQ ID NO: 1587

SEQ ID NO: 14002 - DNA, 201 bp, Homo sapiens; identical to SEQ ID NO: 1587

SEQ ID NO: 14003 - DNA, 201 bp, Homo sapiens; identical to SEQ ID NO: 13658

SEQ ID NO: 14004 - DNA, 201 bp, Homo sapiens; identical to SEQ ID NO: 13659

SEQ ID NO: 14005 - DNA, 201 bp, Homo sapiens; identical to SEQ ID NO: 13660

SEQ ID NO: 14006 - DNA, 201 bp, Homo sapiens; identical to SEQ ID NO: 13661

SEQ ID NO: 14007 - DNA, 201 bp, Homo sapiens; identical to SEQ ID NO: 13662

SEQ ID NO: 14008 - DNA, 201 bp, Homo sapiens; identical to SEQ ID NO: 13663

SEQ ID NO: 14009 - DNA, 201 bp, Homo sapiens; identical to SEQ ID NO: 13664

SEQ ID NO: 14010 - DNA, 201 bp, Homo sapiens; identical to SEQ ID NO: 13665

SEQ ID NO: 14011 - DNA, 201 bp, Homo sapiens; identical to SEQ ID NO: 13666

SEQ ID NO: 14012 - DNA, 201 bp, Homo sapiens; identical to SEQ ID NO: 13667

SEQ ID NO: 14013 - DNA, 201 bp, Homo sapiens; identical to SEQ ID NO: 13668

SEQ ID NO: 14014 - DNA, 201 bp, Homo sapiens; identical to SEQ ID NO: 13669

SEQ ID NO: 14015 - DNA, 201 bp, Homo sapiens; identical to SEQ ID NO: 13670

SEQ ID NO: 14016 - DNA, 201 bp, Homo sapiens; identical to SEQ ID NO: 13671

SEQ ID NO: 14017 - DNA, 201 bp, Homo sapiens; identical to SEQ ID NO: 13672

SEQ ID NO: 14018 - DNA, 201 bp, Homo sapiens; identical to SEQ ID NO: 13673

SEQ ID NO: 14019 - DNA, 201 bp, Homo sapiens; identical to SEQ ID NO: 13674

SEQ ID NO: 14020 - DNA, 201 bp, Homo sapiens
gagctttagaagaacttgaagcagaaacagaggctagggaatggagtagagggcattatgaaaaaaaccagcaaactgtgcctattacatcgctatctgcytcatagcctaaaaagcagtgtctatacattttatgtggctaagcacaagaaatctcccagtgctaacagtacggacacaacagtaatttaaaaaataaca

SEQ ID NO: 14021 - DNA, 201 bp, Homo sapiens
aaactgtgcctattacatcgctatctgcttcatagcctaaaaagcagtgtctatacattttatgtggctaagcacaagaaatctcccagtgctaacagtayggacacaacagtaatttaaaaaataacaatgtctttcattaactgaacacttactatgtgtcaggcactatgcaaaactccttgcaagcactgccctaca

SEQ ID NO: 14022 - DNA, 201 bp, Homo sapiens
cctctgatcacaggaatgaatgtctctgtgggcagcaaggcattgacctaaagagaaattttatatttaacatgaaaagaaaaacaaattaaaaaaaaaaycaacttcaattaagacagactgctgtccactgcacacctccaggcaccaggcacttccacacacattttcttatttaattcttaaaataacctttcaggt

SEQ ID NO: 14023 - DNA, 201 bp, Homo sapiens
tgcgttcctttccatggactgtgcaactgcactgatatagccgagaacggtctccagcaacctgaaacacagaggctcgctcagcaaacggcagctgaagrcactcagagaacttgttcatgtctaccttatgctaaatgtttcaagtagaaagacgagttaaataattctgtactaaattatttcaaaaactactcggaa

SEQ ID NO: 14024 - DNA, 201 bp, Homo sapiens
gcgttcctttccatggactgtgcaactgcactgatatagccgagaacggtctccagcaacctgaaacacagaggctcgctcagcaaacggcagctgaaggmactcagagaacttgttcatgtctaccttatgctaaatgtttcaagtagaaagacgagttaaataattctgtactaaattatttcaaaaactactcggaaa

SEQ ID NO: 14025 - DNA, 201 bp, Homo sapiens
gagctagagggaagagtggagacagaagttgacaccgcacagcagaggaggggagaagggggcgcagacaaaatcagctccaaaaacgaaagtcctacgcrtagcgctacaagtcagcccacaggactggaactcagcagctcacattcctggctgcagggcaggcactttccagtggaaggggcaggacagtggccctgg

SEQ ID NO: 14026 - DNA, 201 bp, Homo sapiens
catcatcagccccatgtttaaactggacaatatcataaaatctgtgtgagaaatcaccattttccttatcttcccaccctaggttctgaccttttcgccayaggcagccgccagcactgtttttgtgacatactgttcaaaaagcaagatgaggagaatccagaggaatttctctgcacccagtgtatcaacaagttgaac

SEQ ID NO: 14027 - DNA, 201 bp, Homo sapiens
gtttgaaccattttactccaggtattggtgatcaaaatatagttgttgaataaatgacagaaagaatgacagaaaacacttgaatgaatgaataaaccaaygtctacctgtctcaaccctctgctctccatcaatcaatcaccattacattcttcaaacatgctgtgcacattcctagatcatgccttttctcatactatt

SEQ ID NO: 14028 - DNA, 201 bp, Homo sapiens
ataatttataatagccccacagttgaaacaacccaaatgtccatcaaccgatgaacagataaacaaaatgtggcatacacatacaacaatattattcagtyataaaaggaatacggattcaagcttcaacaagaatgaacctcaaaaacattatgctaagcagccgggcacggtggctcacgcctgtagttccagcacttt

SEQ ID NO: 14029 - DNA, 201 bp, Homo sapiens
ggcatacacatacaacaatattattcagtcataaaaggaatacggattcaagcttcaacaagaatgaacctcaaaaacattatgctaagcagccgggcacrgtggctcacgcctgtagttccagcactttgggaggccgaggcgggcggatcatgacatcaggagatcgagaccatcctggctaacacggtgaaaccccgt

SEQ ID NO: 14030 - DNA, 201 bp, Homo sapiens
cttgtcttgattatgatacagtatcacttctccagtccagagtcactcaatttcacgctcatcccttagagtggacaactagtaatgcaatacagaatcawccataccgattgtttccaagtgccggatcagatatgtatattctaatcagctaggaaggaataagacatatacacacatgcacaaaaacagatttactgc

SEQ ID NO: 14031 - DNA, 201 bp, Homo sapiens
ctagtaatgcaatacagaatcatccataccgattgtttccaagtgccggatcagatatgtatattctaatcagctaggaaggaataagacatatacacacwtgcacaaaaacagatttactgccccagagattctttagatatggggtgggatccagatatctctttttataaggttctaacatcacaactaaatctttgg

SEQ ID NO: 14032 - DNA, 201 bp, Homo sapiens
aacagatttactgccccagagattctttagatatggggtgggatccagatatctctttttataaggttctaacatcacaactaaatctttggattctgatwcaaagaaaacaactataaaaaatacttttgtgataaccatggaaatatgattatgaactaggtattagataataccaaggaattatttttttttttactt

SEQ ID NO: 14033 - DNA, 201 bp, Homo sapiens
taaatatagtaatgggcctaacatattagtaggagtgtagcaatgttagtttctattcaacctaccgattagtattgtgattgtactcttttacagggccygtgctattatatactcttcactgtttacaagtctacttttgtttacattataaactgtcataacccaaataacccacagtatctttttatttatttatta

SEQ ID NO: 14034 - DNA, 201 bp, Homo sapiens
taccgattagtattgtgattgtactcttttacagggcccgtgctattatatactcttcactgtttacaagtctacttttgtttacattataaactgtcatwacccaaataacccacagtatctttttatttatttattattttttttgagatggagtctcgctctgtcgcccaggctggagtgcagtggagcgatctccgc

SEQ ID NO: 14035 - DNA, 201 bp, Homo sapiens
acaaggacatggaaagagaaatgatgctagatcctacatgaacatgctgggagctttttattcaagacagtcattgtggagtcaatcattcagttttgcasagtatcacatttaaaagattcacagcttgtatcttacctttaggaaaagatttaggagctttcagtgcataaataaattttttcaaggaaaatacaagaa

SEQ ID NO: 14036 - DNA, 201 bp, Homo sapiens
cataaataaattttttcaaggaaaatacaagaaaaaccgagtcctccacggccaccctctgagtgctgttgagctcttctacataatgtgcccacagctcyactgggatccctctgtctaacatcagttcaatgtgccattctgaggggatttcctgaaatgttaaaggaaacaaaaactagtacaaactaagggttctga

SEQ ID NO: 14037 - DNA, 201 bp, Homo sapiens
tttcttttaaagatgaacaacaagagacgagcacagacaggatcacatgaaacgttactttctgcttcaggttaaaggactcctcctcacccacgcttatyaaatcctccaccttgaaaaataaacacactctattaccagttgctcttgattttcataaaacaattttttcaactcaggtctatctaggtattatgtgtt

SEQ ID NO: 14038 - DNA, 201 bp, Homo sapiens
ttcaggttaaaggactcctcctcacccacgcttattaaatcctccaccttgaaaaataaacacactctattaccagttgctcttgattttcataaaacaaytttttcaactcaggtctatctaggtattatgtgttttacatttaaagtgagatgacaaacagaaagcctttataaagtactaagcactgatttctaagta

SEQ ID NO: 14039 - DNA, 201 bp, Homo sapiens
cacactctattaccagttgctcttgattttcataaaacaattttttcaactcaggtctatctaggtattatgtgttttacatttaaagtgagatgacaaayagaaagcctttataaagtactaagcactgatttctaagtaattataagaataatttcagaaactgtaatgaacataattgcacttgccaactggttaatg

SEQ ID NO: 14040 - DNA, 201 bp, Homo sapiens
ctattaccagttgctcttgattttcataaaacaattttttcaactcaggtctatctaggtattatgtgttttacatttaaagtgagatgacaaacagaaarcctttataaagtactaagcactgatttctaagtaattataagaataatttcagaaactgtaatgaacataattgcacttgccaactggttaatgtattta

SEQ ID NO: 14041 - DNA, 201 bp, Homo sapiens
aaaatatataaaatgttaaaagatttcaaacattgcacagaatatattaaacaacactgcaacgtttaaagtaaaaccaagtactcaagaataaaagaaawtttttttaagaaaaatctagtaaagcaaaagctgagaatttaataagagtatgagaaagaaatccagggggtggactttcaaagcatacttaccatcttt

SEQ ID NO: 14042 - DNA, 201 bp, Homo sapiens
agtaaaatcgaatgcagagagctcttatgtcaccaacactcaaagaatcacatgaagaattcaggcaaacattttactattgtttatgaaggtttgctttytatttttccttgtatccgattctgaatttgtctatgaattggcttccttttcactgtatactttttatcttggcaaaaattttaaaagaccttactggca

SEQ ID NO: 14043 - DNA, 201 bp, Homo sapiens
atgaaggtttgctttctatttttccttgtatccgattctgaatttgtctatgaattggcttccttttcactgtatactttttatcttggcaaaaattttamaagaccttactggcatataagcatgaccaacaataaattttaaattttccttgttttcttttgtgttatctgttcactttttctaaaaaaacaactgaat

SEQ ID NO: 14044 - DNA, 201 bp, Homo sapiens
attaatatgtcagcggctatcttaagtacctcgtacctaaaagacatgcaagcacacttggttgaaagacacattggaaggcttcaattgggcaaaaattyatcattacattactccagcttaactgacaatatcctggtctcctgaccaaaactattattcagatacactaagacaccacttaaaatccatgccaataac

SEQ ID NO: 14045 - DNA, 201 bp, Homo sapiens
gttcactcaggcactcaaaaaaaatgaaccaagcacatcctacatgatagatatctacccatacgatagatacaaaaacacgtaagacacactctcatccyctatggagcttgcttactttttcttgcaaaaagctttggtgccaaaaatgaaataaacagagctcattaaaaacttaccacagatggtatcatgtgtctc

SEQ ID NO: 14046 - DNA, 201 bp, Homo sapiens
atggtggcacatgcctgtaatcccagctaccagggaggctgaggcaggagaatcgcttgaacctgggaggcggaggttgcagtgagccgagattgtgccaytgcactccagcctgggcaataagagcgaaactccatcttaaagaaaaaaaaaaaaggaaaagaaactagagtgtaagtcttccaatttgctcatgagaac

SEQ ID NO: 14047 - DNA, 201 bp, Homo sapiens
acgagacaaaggatctcagaaaatttcccaactcaaacatctaccacatgtcctgacaggagccagtaagctcttcttttatacataaaatcctacttatrgtagggagacctcaatcagatcactaatggaagaaacaagtctgatgaaaggtcacaagttgggacactggtgggaagtgaaagcagtacctccacaggg

SEQ ID NO: 14048 - DNA, 201 bp, Homo sapiens
tccagtgaggtacaaagactgctatggaaatcaatctaggagatggccgcaggaccagacagccaatatttattcttaagagtcctaattaaggtcccagkccagtgagtttctaataaaaaagtgtcatattttcaacctaaaggctaaatctcagctatcatctgaaataaactgtcaatttaaaaacacttaaatcta

SEQ ID NO: 14049 - DNA, 201 bp, Homo sapiens
aaaaaaagcaaacagtccaactgaacacaaaacttaataataagcacctatttcctcacatgcccaaactgtattattaataagctaaaacaacctagaaygagtagcagtaaaaatcacaaaattataagatacagagcatttaaaaagtccccaattttgcattcacatatccctcaacatggtccagccaattcctat

SEQ ID NO: 14050 - DNA, 201 bp, Homo sapiens
acaaatgtaattatgtgctctttcaaagaactaacaaaaaataaacactgaggaattgttcagggaaaagtatatgatcatctaacttgctttcacagaayatttacaaagagtaattttggaattaaaaaaaaaacaacaagaaacaaaacaaaaaaaaaccaaggacatcttcaaatttccccagggccactcctatgc

SEQ ID NO: 14051 - DNA, 201 bp, Homo sapiens
aattcaaactccttctctgttcactgtttgaatatttaatattccagagaaaggttaggcatatgttacctggtgcattcttttgaaaatacacaagagcrtactataaactctgttctacaccaactgctatcacatatgagctggacattgcgcaatggtgcaatctcggctcactgcaacctccgcctcctgggttca

SEQ ID NO: 14052 - DNA, 201 bp, Homo sapiens
tacagatattgacctatcagttcctaaatccaatgacttagtccatcaaaatccctacacagtgaaatgtcgagaatggagaaaattgctccagtacacasaggcatgaacacactcaatcttctttgctaacgagcttacctgaataacataggcagcatctgaagtgatctcctctgctttagaaatcaaatgatctat

SEQ ID NO: 14053 - DNA, 201 bp, Homo sapiens
tccatttctccttaaaaccttaataagaaacgttattaaaaacacacagctggcttactatgaaaagctacacactaaacctttatccaatgaaaagaacwaaattgaaatatgacattgctatcttttcaaaagtagggggacacagatgtacagatattgacctatcagttcctaaatccaatgacttagtccatcaaa

SEQ ID NO: 14054 - DNA, 201 bp, Homo sapiens
gatgtgacattgtttataattttccatttctccttaaaaccttaataagaaacgttattaaaaacacacagctggcttactatgaaaagctacacactaawcctttatccaatgaaaagaactaaattgaaatatgacattgctatcttttcaaaagtagggggacacagatgtacagatattgacctatcagttcctaaa

SEQ ID NO: 14055 - DNA, 201 bp, Homo sapiens
gggaaatttgggacagaaagagttttgggaggaagttggagagaagggcaactccctgtgtgagataatattacatactagatggataggaaatagagagraaaaaagatttttgttttatgtttggattcttccttaggtattcttaaaagacttatgtgaaaatttcaatttatttttagttctatttgagagtgacta

SEQ ID NO: 14056 - DNA, 201 bp, Homo sapiens
atcaacaggagcaagttcctgaaacatctttggaaaccggcaggtggcaccaaagcattttcctgaccccagagggcattcagggtatccccagttgcctyatggaagtatcagttttcacactttttaaaatggaaaattatatacaattatctaaaaattggttcatgaaagcttccatgtgtcataaaaatgccataa

SEQ ID NO: 14057 - DNA, 201 bp, Homo sapiens
ctaccaaaaaatttataattttttttttttttttttttttggttattttgaaatgtactgggagggagctaggaattaaaaaaaaaaaaaaagatttggamatcaacaggagcaagttcctgaaacatctttggaaaccggcaggtggcaccaaagcattttcctgaccccagagggcattcagggtatccccagttgcct

SEQ ID NO: 14058 - DNA, 201 bp, Homo sapiens
atgtgtgtaattagcaatgtaaagtcaacatatgaaatctacattttggcaatatgctaaaaaaaattgactagttaaatgattgagaagtatgtgtttcrtcatattgcatcccaaacaaatttatttgcatttttataagcttgagcacttgtgctcttgctaccaaaaaatttataattttttttttttttttttttt

SEQ ID NO: 14059 - DNA, 201 bp, Homo sapiens
ttgcactccagcctgggcaacaagagcgaaactccgtctcaaaaataaaacgaaacaaaaaacaaacaaaaaaacaaattctccctatgctcttaggcagsgtccggaaacagtacaatccacggatattcagtgtattcagacagggttgtcttttactttcaggacaagggacaagagacctatttcccacaaacttaa

SEQ ID NO: 14060 - DNA, 201 bp, Homo sapiens
cgacatcgcgccgtttgcactccagcctgggcaacaagagcgaaactccgtctcaaaaataaaacgaaacaaaaaacaaacaaaaaaacaaattctccctrtgctcttaggcagggtccggaaacagtacaatccacggatattcagtgtattcagacagggttgtcttttactttcaggacaagggacaagagacctatt

SEQ ID NO: 14061 - DNA, 201 bp, Homo sapiens
caaaattaccatgtatgctgtttgatcaagattttcatgtaattgtgttctatcagaaataatgatcaaaaaggattaaaaataaaatttaattatattcmaaacatatagtttgaatgtttcaataaaaatataaattaaattaaaaagcaatacattaaatctttttcacttttttcaaaagatttacctttcttataa

SEQ ID NO: 14062 - DNA, 201 bp, Homo sapiens
ttcctatgtcagctgtgatggtgtatagtgccatgccgaattttactttggaaagtaaaaaggaaaacaagtcagatgttcataaatgtaatttttttttwaaaaaaagctttggttttaaaaaaaatgtaataatcttgaattatatatttttatctgacggacagatgtaccaagctggtattttcttcatagccatta

SEQ ID NO: 14063 - DNA, 201 bp, Homo sapiens
aactgggaatttgggtatatcttggaaggcaacaactcttcacagcgcttcccacatggtaccaaggagcccaaccctcacccggaaacctaaggcatgcygtagagcaacttcctgctgcaggcgctacggcaagtgaagaggttcaagcttgccgggaatgcgacgagacagctccgcctcccgagacgaaagcccgcc

SEQ ID NO: 14064 - DNA, 201 bp, Homo sapiens
tgcctccatcccccttttagctgttcttctctttgacatattagttgacctctctaattttgtttcttcatctgtgaaatccagatacctctactcataarcatttcaagcaccaagcacctgactgttatgttctctttcccttaaaaatatacatcaacatgctagaaactgctaaggaagaggacgggacagaagaga

SEQ ID NO: 14065 - DNA, 201 bp, Homo sapiens
cttcaactattccaggcagaactatatccacaaaactctgcttaatcctttattatggcatttatttcaaaacagtaatcaacggcaacctacttatctawgtactgaacttagtatttgctgaataaataagttatctgaagacataaaatgaaaaatcaaatgcaaaaagtattccttacattaatgatctatttgggg

SEQ ID NO: 14066 - DNA, 201 bp, Homo sapiens
tattgcatcccaaacaaatttatttgcatttttataagcttgagcacttgtgctcttgctaccaaaaaatttataattttttttttttttttttttttggktattttgaaatgtactgggagggagctaggaattaaaaaaaaaaaaaaagatttggaaatcaacaggagcaagttcctgaaacatctttggaaaccggca

SEQ ID NO: 14067 - DNA, 201 bp, Homo sapiens
tcatattgcatcccaaacaaatttatttgcatttttataagcttgagcacttgtgctcttgctaccaaaaaatttataatttttttttttttttttttttkggttattttgaaatgtactgggagggagctaggaattaaaaaaaaaaaaaaagatttggaaatcaacaggagcaagttcctgaaacatctttggaaaccg

SEQ ID NO: 14068 - DNA, 201 bp, Homo sapiens
agtacctccacagggcacctgggaaggcagcaggcaagaaggcacttgggaaggagaaacgctgagaggcaggagccagtgcacaaagaatactgagaggytgcttacgcctcaaagagactgtctgctccgtcctccttccagtgaggtacaaagactgctatggaaatcaatctaggagatggccgcaggaccagacag

SEQ ID NO: 14069 - DNA, 201 bp, Homo sapiens
gcattataatcccagcactttcggaggccggggcaggagaactgcttaaggtcaggagttcgagacctgtctgaacaacatagtaagactacattgctatyttaaatggtgctggctcacgcctgtaatcccagtactttgggaggccaaggtgggcggatcacctgaggacaggagttcgagatcagcctgaccaacatg

SEQ ID NO: 14070 - DNA, 201 bp, Homo sapiens
gctttagaaatattatctctaattgtcatacttatacaaggtatagtttaatacttattttacagataaagaaactagaggcctggtgtagtggttcacaycactggcattataatcccagcactttcggaggccggggcaggagaactgcttaaggtcaggagttcgagacctgtctgaacaacatagtaagactacatt

SEQ ID NO: 14071 - DNA, 201 bp, Homo sapiens
agggatacacatctatgtaatattaaaattatttaaagcctaaaagatctatttttagtaaacaattgaatgaaatagtattttgttcaagcactaacacrccaagtgaattcttcatcgctagaggtagttaggtgtagcttgggtaattatccaataaagacaataaaagagaggagagtcaggcatcagatacaaaat

SEQ ID NO: 14072 - DNA, 201 bp, Homo sapiens
gagtgcaatggcacgatctcggctcactgcaacctctgcctcctggattcaagcgattctcctgcctcagcctcccaagtagctgggattacaggcacgcrccaccacatccggctaattttgtatttttagtagagacggggtttcttcatgttggtcaggctggtctcgaactcccaacctcaggtgatccgcccacct

SEQ ID NO: 14073 - DNA, 201 bp, Homo sapiens
aaaagaaactcaccagtacttgtctttgtatcttgtatctgtttttctctacctcaactcatccccctctcaaattaatattacatttatctcttctgagygcacacatgcaactcttacaattgtcttcttcacccacaagcagttacaacaattctttagtaacatcacaggaatgtacaatccacttaaatggcacat

SEQ ID NO: 14074 - DNA, 201 bp, Homo sapiens
aagttcatttaaaataaacttaatgattagacagggacaacacatttaattttaaaataaaaagaaactcaccagtacttgtctttgtatcttgtatctgkttttctctacctcaactcatccccctctcaaattaatattacatttatctcttctgagcgcacacatgcaactcttacaattgtcttcttcacccacaag

SEQ ID NO: 14075 - DNA, 201 bp, Homo sapiens
agagatgaaccaacagcttctttcagcagtgcagccccatgagacacgagactgttaagttcatttaaaataaacttaatgattagacagggacaacacayttaattttaaaataaaaagaaactcaccagtacttgtctttgtatcttgtatctgtttttctctacctcaactcatccccctctcaaattaatattacat

SEQ ID NO: 14076 - DNA, 201 bp, Homo sapiens
ttcaacttcagattttcattttaaccaagctctcctactaccatgcacttgctttctatacaatttgtcttgggagtctcaagttacagccctgcacttgwcttgattatgatacagtatcacttctccagtccagagtcactcaatttcacgctcatcccttagagtggacaactagtaatgcaatacagaatcatccat

SEQ ID NO: 14077 - DNA, 201 bp, Homo sapiens
attcaacttcagattttcattttaaccaagctctcctactaccatgcacttgctttctatacaatttgtcttgggagtctcaagttacagccctgcacttktcttgattatgatacagtatcacttctccagtccagagtcactcaatttcacgctcatcccttagagtggacaactagtaatgcaatacagaatcatcca

SEQ ID NO: 14078 - DNA, 201 bp, Homo sapiens
tagatcttgtgattttctggaaaatggagaagacaaaacgttggaaaagcaaactctatcatgtgctaagtaaaaaccattgtgcctgattatagcaaatygatgagtatcaaaaagttccaatggtttcataacattcagagtcagggaacaacagcatgtgctcaatgcatttgtagctcttacttctgctgcattttt

SEQ ID NO: 14079 - DNA, 201 bp, Homo sapiens
ccattagcctatctggaatcttacaggacaaccttcagaattactttgcctttcacatgaaagcacacgctacaattcatactcaatttacacacacacayacacaaatctacgtatatagaatatatacatctatatatatgaaaatatatttagatagcaaacactatatacacacatatctatatctatataaattca

SEQ ID NO: 14080 - DNA, 201 bp, Homo sapiens
gtagggtttcttttctggggtgatgaaaatactcttcaagtagatcgtggtggtgattacagaaacttcgtgaatatactaaaatcacttaattgtatacyttaaatgggtgaattttatggcatctgaactatatttcaataaaaacagaaaaaatattaatgattcttaactgtttctggattatcaacccctttgaga

SEQ ID NO: 14081 - DNA, 201 bp, Homo sapiens
aacttcagctgtatcctagctctgccacttactagctgtgtgactcaagaaacttaatccctctaagcctcagttttctcaactgtaaaacaaggataatrcaaataatctcaccagaggaatgctgtgagaattaaatgagataatgcagataaagtgcttaccagggcctagtgtataaatgctcaaaaacacattagc

SEQ ID NO: 14082 - DNA, 201 bp, Homo sapiens; identical to SEQ ID NO: 13676

SEQ ID NO: 14083 - DNA, 201 bp, Homo sapiens; identical to SEQ ID NO: 13677

SEQ ID NO: 14084 - DNA, 201 bp, Homo sapiens; identical to SEQ ID NO: 13678

SEQ ID NO: 14085 - DNA, 201 bp, Homo sapiens
taggactacaggtgtgagccaccatgcctggctaagatgttttttctaattctgccaactgatccctcttctgtgaaaactctcctatccttttacatcgkgtactttttttaaacagtaccatacattgccttttattagatttttttttttttccagagtctacttggtcacccaggctggagtgcagtggtgtgatct

SEQ ID NO: 14086 - DNA, 201 bp, Homo sapiens; identical to SEQ ID NO: 13686

SEQ ID NO: 14087 - DNA, 201 bp, Homo sapiens; identical to SEQ ID NO: 13687

SEQ ID NO: 14088 - DNA, 201 bp, Homo sapiens; identical to SEQ ID NO: 13688

SEQ ID NO: 14089 - DNA, 201 bp, Homo sapiens
atctactttcctccaccatatgttgcaaacaaagtgctaacggttagtcagttggttttcctacaatagcatgctgtcttttcttacccagacccttcctkttatacaagcatccttttcttagtctgtaaattaactcctagcatcttcctcacaactttagtaaattcttgaaacccctgaagttatccttatcctttt

SEQ ID NO: 14090 - DNA, 201 bp, Homo sapiens
tcctgttccaagtctccggccgcatacctgggaagctgggggatggccagcgcctccagggtggaggtcacctctgctatgcacagcagcgcgcttcccargacattcttctcctcctttctctctggagcaatcagtttcacagcagtgttcagcactgggacaaaaggatctggattttctgcaccaaaattcttgcat

SEQ ID NO: 14091 - DNA, 201 bp, Homo sapiens
cgcctccagggtggaggtcacctctgctatgcacagcagcgcgcttcccaggacattcttctcctcctttctctctggagcaatcagtttcacagcagtgytcagcactgggacaaaaggatctggattttctgcaccaaaattcttgcataaaagctttaaggtatacaacgctgtctgtctgttgattgcttgttcttc

SEQ ID NO: 14092 - DNA, 201 bp, Homo sapiens
gctacttgggaggctgaggcaggagaattgcttgaacctgggaggtggaggttgcagtgagatgagatcgtgccactgcactccagcctgggcgacagtgygagactgtctcaaaaaaaaaagacatacatattgggagaataaataaaacaaaaatgtgtatgctgtgatgtgacaccaatatgtgagaaaataaactaa

SEQ ID NO: 14093 - DNA, 201 bp, Homo sapiens
actttcctccaccatatgttgcaaacaaagtgctaacggttagtcagttggttttcctacaatagcatgctgtcttttcttacccagacccttcctgttayacaagcatccttttcttagtctgtaaattaactcctagcatcttcctcacaactttagtaaattcttgaaacccctgaagttatccttatccttttaatt

SEQ ID NO: 14094 - DNA, 201 bp, Homo sapiens
ttgtacatggtatgtaatagatgctccataaatactgattaaataaatgaaaggagaattttaagtgaactttagtaggtgagtggagtttggctacctgsaataagagtgcctagggagcagcaagatccaaggtagattagaggaagaataattttgatgctatgggcagagtgaatgttgggaagagcagttaatgag

SEQ ID NO: 14095 - DNA, 201 bp, Homo sapiens
agcaaaaacctgaaacaaggaacacaaacaaaacacatttaacagtgaaagggaggtagaaggattgcttgaggccaggagttcaaggctgagatttcaaygaactatgatggcaccactgtactctagcctgggcgacaaagcaagtccatgtctccaaaaaaaaaaaaagtgaaaggccaaataaatatttacagctct

SEQ ID NO: 14096 - DNA, 201 bp, Homo sapiens
ttttcatctataagcactaaagacatgcaagaaaaattacttttgcttttaatgctgccagttactggattaagtacttatagttaatgaaatgatacagrcaaaacaagatatacattaaaaaggaatgctgggaaatttctaaccaatcttgaaaattatactgagtcacaaaaatgtaaatcaaaagcatgtcaaaaa

SEQ ID NO: 14097 - DNA, 201 bp, Homo sapiens
cagtatattaagatgtgacttgtgaatcatatctttatagaacaggaagtactttagaagagcataaacatacacacgtaacttacttgctttctaaaagyctaatgagtggaagaaattgttcattaagcaaagacactttattagaatccatttcttcctgtgaactatatgaaatatactcttcaaatagaaggctgt

SEQ ID NO: 14098 - DNA, 201 bp, Homo sapiens
attaatctacaaattccagtttgaaaaacactaaagataaacaactgtcaatgtggaaacataaaagtagttgttattaggttattgttaaaatggggacractggcatacacagtcctaaatattagtctaaggtactctcatgaggtttattcaactcatctgtatcattacccacttaggtggtaacttcaatttctt

SEQ ID NO: 14099 - DNA, 201 bp, Homo sapiens
agaaaaaggtaacaaatctgtacttaggaattgtgaaggcataatttcaggataatgtgcgttaggatttctagcagaacagagtatactactttatttasagtgggtcgagatctactcccagatcccatgtctaagaagtcatttaaaaatggtcctcgacttatccaaacagggctttatccaaacaatcacctgtgt

SEQ ID NO: 14100 - DNA, 201 bp, Homo sapiens
gatcctcctgtctcattctcctgggtagctgggaccacaggctaacaccatcacacctggcttcatcaaccctttcctaagccagcctcagtggtgctgcrgttcgtgggattttcttcaaggctctgctgcatggtacaattttaatattttgctgccactcctgtggtacctactttttttcttttcatgtaaatgtct

SEQ ID NO: 14101 - DNA, 201 bp, Homo sapiens
tcacggaaggagtctctgaacttccaactgcaggtgtagatttctttattcaatgtgtctaatgtaaatggggttggcagtgcagtgttaaaaaccactakcctatagaatgacttactgctaagacacttccttacccacatcaccacatataccacatacaccacatactgtccagggacctccctcgtctgtccctgc

SEQ ID NO: 14102 - DNA, 201 bp, Homo sapiens; identical to SEQ ID NO: 13694

SEQ ID NO: 14103 - DNA, 201 bp, Homo sapiens; identical to SEQ ID NO: 13695

SEQ ID NO: 14104 - DNA, 201 bp, Homo sapiens; identical to SEQ ID NO: 13696

SEQ ID NO: 14105 - DNA, 201 bp, Homo sapiens; identical to SEQ ID NO: 13697

SEQ ID NO: 14106 - DNA, 201 bp, Homo sapiens; identical to SEQ ID NO: 13698

SEQ ID NO: 14107 - DNA, 201 bp, Homo sapiens
caagtcacttaacctttctggatctcactattctcacctataaaacaggtttgctaataaataatacctacctgcaagggttgttagaagattaaaaaatwcatgtcagtctgtagcacagtgctttacacatagtactgttaaaagctagctagtattatctaaatttttacaaggataaggacatgtactacaaagcca

SEQ ID NO: 14108 - DNA, 201 bp, Homo sapiens
acctgcagatgattttaaacaagcagcaaaatgttaggtgtttagaaattatactgtaagtgccaaaagaatgcagaacaggtgtaagaaaatgacaaatrtgactctgtacaagcagtacagagtaataacttagaaggaaaataatccaaagccagatttacaatgtaacgtctccagtgagggatttgattaactcaa

SEQ ID NO: 14109 - DNA, 201 bp, Homo sapiens; identical to SEQ ID NO: 13699

SEQ ID NO: 14110 - DNA, 201 bp, Homo sapiens; identical to SEQ ID NO: 13700

SEQ ID NO: 14111 - DNA, 201 bp, Homo sapiens
gtgagtttttacagttcaccaataaatcaaacaacattcttaaaagcttctgctgaactttttcatctgatatggctgcaaaaaatggttttgtaatctaragggggtagaaaaaaggcaactgagttcagtgaacaagtttaaattccagaaataatttttatatcaacctctctcaaaatacaaaattgtttcccactt

SEQ ID NO: 14112 - DNA, 201 bp, Homo sapiens
aactatatttcaataaaaacagaaaaaatattaatgattcttaactgtttctggattatcaacccctttgagaagcacagactctcttacaagaaaaaaaraaatcccatacagataaaactttgcatatgatttcagtagattaagatcccctaaagctcatggagaaccccaggttaaggagctctgactcaaatcctc

SEQ ID NO: 14113 - DNA, 201 bp, Homo sapiens
aaactgatgcaatgtcctgaaatagatggtggatgtcaatttaccccacccgaatgatgttaagacacttacagttacacactcacagcacagcagaaccrgctataacacgtttgtttatattattgagaaagacattgccaagactgcttcttagcttcaatgttctaaaacttaagggcaatgtacttcagcatttca

SEQ ID NO: 14114 - DNA, 201 bp, Homo sapiens
agatcctcctgccccagcctccgaagaagctgggacatcccaggaccccaccaccactttttaaaaatttttgtagagacggggttttgctatgttgaccrggctgttctcaaactcctggcctcaaataatcccacctcagcctcccaaagtgctggtgttacaggtgcatgccaccacactcagccacaagagttttaa

SEQ ID NO: 14115 - DNA, 201 bp, Homo sapiens
ataccacatacaccacatactgtccagggacctccctcgtctgtccctgccaaacctgagctgactgcaggatgggacaagttactgcctcgccaaacagkgatgacagggccaatggctggccacgcagaaaacagtctctgcggagctcttagagtaccttccttctaacgtgccttgtcgttctgcttcgaattgtag

SEQ ID NO: 14116 - DNA, 201 bp, Homo sapiens
caattaacgggataacattttcccagagaaatgtgttcatctattacatccagtttctcctcttctaaattagtgaaaaacgtgagtgtatttgccaagaragtacccagtggccctgagaagcgagtgtttaagacaaaaaacaaaacagggaaactggacaatcaaatggaagaaaccacatcacggaaggagtctctg

SEQ ID NO: 14117 - DNA, 201 bp, Homo sapiens
tctatttcttccaagttttcttctgtgtcccttcatatcttgcacatttcccctgtaatatttgtgcacatatttttgtcaggcttattcttggtaccttrtaagtttatgtttgtattatacaggaaatctttttttctactctgttttctaatttgaggaataacaatattatataacagtggtgagactaattagttc

SEQ ID NO: 14118 - DNA, 201 bp, Homo sapiens
actcaggtctatctaggtattatgtgttttacatttaaagtgagatgacaaacagaaagcctttataaagtactaagcactgatttctaagtaattataakaataatttcagaaactgtaatgaacataattgcacttgccaactggttaatgtatttaaatcacacatctaatcctttacaaaggtttatttaataaggc

SEQ ID NO: 14119 - DNA, 201 bp, Homo sapiens
gattataggcgtgagctaccgtgcctggccaaaataggtatatttcaaaacaggaagataaacagttggattgccaagacatagttaaagggaattctttsatttcactgttttaccactaatctgaataaggtacatggcaaaaatctccaaacctgcagatgattttaaacaagcagcaaaatgttaggtgtttagaaa

SEQ ID NO: 14120 - DNA, 201 bp, Homo sapiens
taacagtaaactcacctaaaataaagaccgaaattttgtaagcgaataaaaaattacttttgtggaattttattttagaaataaaacttgaaattacatawctactttaaatgtaacaaaatttggttacaaatgtaattatgtgctctttcaaagaactaacaaaaaataaacactgaggaattgttcagggaaaagtat

SEQ ID NO: 14121 - DNA, 201 bp, Homo sapiens
aatatatataataaacgagcaaatgattttggaattttcatagactcgtgtccaaatatattcctttgtatagaattttcacttgaaaaacagagatgaascaacagcttctttcagcagtgcagccccatgagacacgagactgttaagttcatttaaaataaacttaatgattagacagggacaacacatttaatttta

SEQ ID NO: 14122 - DNA, 201 bp, Homo sapiens
actgaaacacagccatgctcatttgtttacaccctgtctgtggctgctttcctgatacaactgcagagatgagtagctgcaacagagactgtgtggccccraaagcataaaatatttcctatctggtcctttacccaagaaatttgtcaattattaatttaaactataccagggacaactaagggctgaatgcaacctgtt

SEQ ID NO: 14123 - DNA, 201 bp, Homo sapiens
tggagaaccccaggttaaggagctctgactcaaatcctcaatatgaaaatagcttcaatctctttacaaatgtttaaatgatatttttcataaaagggacrtgatttctttaaatgacatagtttatgatcaaattaattttctgaagtcactggttaaaggttactttgaggattacttgaggataaatgagatattaac

SEQ ID NO: 14124 - DNA, 201 bp, Homo sapiens
tctcactatgttacccaggctggtcttgaactcccaggctggtcttgaactcctggccacaagtgatattcctgctcaggctaacattttccatttcaacrattcattacaactcaccaataaaaagagaaataacctgattaaaaaacaggcaaaggatttgaaaagacatttcttcaaagaaaaaattcatacgaaaag

SEQ ID NO: 14125 - DNA, 201 bp, Homo sapiens
agcagaaccagctataacacgtttgtttatattattgagaaagacattgccaagactgcttcttagcttcaatgttctaaaacttaagggcaatgtacttsagcatttcagaaaggcttttatacaactgttgaggatattaaaaaaaaaaaacaaaaaaaaaaaactaaaaaaaaggcttttaatgtcatttatatgcaa

SEQ ID NO: 14126 - DNA, 201 bp, Homo sapiens
gccattgcactctagcctgggcaacaagagcaaaactctgtctcaaacaaacaaaagaaacaatacatgtgtgaaaagataacaggaggcagtaatggcasatgccaaatatgtgacactgatagcaagtctgcttagactgcctgggaaggctgcacaaatcacacaggatttgggttgtgcctcaagaagaatgaagat

SEQ ID NO: 14127 - DNA, 201 bp, Homo sapiens
cctaactgggtgggcccctctgccaagaaccttcacccactgctttttgactatactagacaaaaggaaggaagaatggaggacgattaacactgcaaagyagtgcatctgaagataaacgggaaggctgcatctttctgtttgaagattaattatttttattattatttctttaagagacagggtctcactctgttgccc

SEQ ID NO: 14128 - DNA, 201 bp, Homo sapiens; identical to SEQ ID NO: 13706

SEQ ID NO: 14129 - DNA, 201 bp, Homo sapiens; identical to SEQ ID NO: 13707

SEQ ID NO: 14130 - DNA, 201 bp, Homo sapiens; identical to SEQ ID NO: 13708

SEQ ID NO: 14131 - DNA, 201 bp, Homo sapiens; identical to SEQ ID NO: 13712

SEQ ID NO: 14132 - DNA, 201 bp, Homo sapiens
actattcccaccatctagcgttgtacatggtatgtaatagatgctccataaatactgattaaataaatgaaaggagaattttaagtgaactttagtaggtragtggagtttggctacctgcaataagagtgcctagggagcagcaagatccaaggtagattagaggaagaataattttgatgctatgggcagagtgaatgt

SEQ ID NO: 14133 - DNA, 201 bp, Homo sapiens
tccaaggtagattagaggaagaataattttgatgctatgggcagagtgaatgttgggaagagcagttaatgagctttatcaaaggctggccttctccaacrttctttagttcaagtgctttacgttcagattcttaaattctccttctaattaaaaagtcctcattactcctatcttactaattctgaacactgaccccac

SEQ ID NO: 14134 - DNA, 201 bp, Homo sapiens
tactgattaaataaatgaaaggagaattttaagtgaactttagtaggtgagtggagtttggctacctgcaataagagtgcctagggagcagcaagatccarggtagattagaggaagaataattttgatgctatgggcagagtgaatgttgggaagagcagttaatgagctttatcaaaggctggccttctccaacattct

SEQ ID NO: 14135 - DNA, 201 bp, Homo sapiens
atccgcctgccttggcctcccaaagtgttgggattacaggcgtgagccaccgcacctggccttaaaattttttaaacagctttcccaggttgaatattccygacatttctagacactctctttgaatagtcactgtaactagaatctggcaaggaatagacatttatttttgtagaaaaacacctttggtgataaaagact

SEQ ID NO: 14136 - DNA, 201 bp, Homo sapiens
ctatgggctctgaatgcaattttttaaaatgccaaaaacctttttgaaaaaggttctgagcaaaaaggttctaaataacacacattaggcatcatcagccycatgtttaaactggacaatatcataaaatctgtgtgagaaatcaccattttccttatcttcccaccctaggttctgaccttttcgccacaggcagccgcc

SEQ ID NO: 14137 - DNA, 201 bp, Homo sapiens
tttccccacaaactgccttcaaaaccgctttgaagagacactgtttcattactcttcagccatactctgctgggcttaaaagagaaccacttgcgtggcascagaactgtttctcagaaaagttaattcgccttcagatgttttgctgcaactgaggatattcagagtgctatgggctctgaatgcaattttttaaaatgc

SEQ ID NO: 14138 - DNA, 201 bp, Homo sapiens
gaactcactcatatctagctcatgctcagtggatctcactgggctgtccaagtggggtgttcagggagttatggccctaggttaatggcaggtgtgtgcgygcacacacacacaggcacacacacgcacacatacacatgcacacacaccatacaccatttatataaagagaaatattaatagaaatgaacatataaccca

SEQ ID NO: 14139 - DNA, 201 bp, Homo sapiens; identical to SEQ ID NO: 13721

SEQ ID NO: 14140 - DNA, 201 bp, Homo sapiens
taatcacctgccatttctattattaaacttttgtgtttggtgagattttgctagtgccagtaacttaaaagcaatacttagaagtgaccagaaatatgtayagatgtacagcccttttttttttttttttgagacagggtcttgctctgttgcccagtttggagtgcagtggtgcaatcacagctcactgcagccttgacc

SEQ ID NO: 14141 - DNA, 201 bp, Homo sapiens; identical to SEQ ID NO: 13723

SEQ ID NO: 14142 - DNA, 201 bp, Homo sapiens
ttacaagaaaaaaagaaatcccatacagataaaactttgcatatgatttcagtagattaagatcccctaaagctcatggagaaccccaggttaaggagctytgactcaaatcctcaatatgaaaatagcttcaatctctttacaaatgtttaaatgatatttttcataaaagggacatgatttctttaaatgacatagttt

SEQ ID NO: 14143 - DNA, 201 bp, Homo sapiens; identical to SEQ ID NO: 1577

SEQ ID NO: 14144 - DNA, 201 bp, Homo sapiens; identical to SEQ ID NO: 1571

SEQ ID NO: 14145 - DNA, 201 bp, Homo sapiens; identical to SEQ ID NO: 13729

SEQ ID NO: 14146 - DNA, 201 bp, Homo sapiens; identical to SEQ ID NO: 13731

SEQ ID NO: 14147 - DNA, 201 bp, Homo sapiens
taaacccagcaggttgagaggccaaggctggcatatcgcttgagcccaggaattcaagaccagtctgagcaacatggggaaactccacctctgcaatgagyacaaaaattagccgggcatggtagcacgccctgggaggctgaaaatgggaggatcagttgagcctgggaggatcaattgagcctgggaggcagaggttga

SEQ ID NO: 14148 - DNA, 201 bp, Homo sapiens
caagaaaattcctttaagtacaaaataatctacttaacacatcagcagtgccaaccttttggatatagggaaatagtttggcgatgatattgtctgatacrtcctctgcagctaccagcgccgacactatggtagaagcatagaaagccaagagcaccctcaactgagctgagctgcccgggtactcagcaaaaacctgaa

SEQ ID NO: 14149 - DNA, 201 bp, Homo sapiens; identical to SEQ ID NO: 13771

SEQ ID NO: 14150 - DNA, 201 bp, Homo sapiens; identical to SEQ ID NO: 13772

SEQ ID NO: 14151 - DNA, 201 bp, Homo sapiens; identical to SEQ ID NO: 1665

SEQ ID NO: 14152 - DNA, 201 bp, Homo sapiens; identical to SEQ ID NO: 13775

SEQ ID NO: 14153 - DNA, 201 bp, Homo sapiens; identical to SEQ ID NO: 13776

SEQ ID NO: 14154 - DNA, 201 bp, Homo sapiens; identical to SEQ ID NO: 13777

SEQ ID NO: 14155 - DNA, 201 bp, Homo sapiens
cttcctttttcttacgctgcacaatggccaaaaggtctggaaccagttttaggaaacgggtaacctgaaggggacagccagaatccccaaatcattaaagytgcaaaaaatgtttgtccattttcccattgtcacagcttgagattgtctaaatggaaatcagactcgggggtcctgagtcacacagtcatgctaagcgat

SEQ ID NO: 14156 - DNA, 201 bp, Homo sapiens
acctctgctatgcacagcagcgcgcttcccaggacattcttctcctcctttctctctggagcaatcagtttcacagcagtgttcagcactgggacaaaagsatctggattttctgcaccaaaattcttgcataaaagctttaaggtatacaacgctgtctgtctgttgattgcttgttcttcttccccttcctttttctta

SEQ ID NO: 14157 - DNA, 201 bp, Homo sapiens; identical to SEQ ID NO: 13782

SEQ ID NO: 14158 - DNA, 201 bp, Homo sapiens; identical to SEQ ID NO: 13783

SEQ ID NO: 14159 - DNA, 201 bp, Homo sapiens
ggatgcactgaactatcaactccacgttgaacttctcctcatctaaaatatctacaatggtgagaaagacaaaaaccctaagtggcaggtacactcacgcycaaagtagataatttttctaacctttccttccaaaaagtacctacctttgggtattttgccaccatctggagatagtttttggcagatgttgagcagaca

SEQ ID NO: 14160 - DNA, 201 bp, Homo sapiens
acgttgaacttctcctcatctaaaatatctacaatggtgagaaagacaaaaaccctaagtggcaggtacactcacgctcaaagtagataatttttctaacytttccttccaaaaagtacctacctttgggtattttgccaccatctggagatagtttttggcagatgttgagcagacaactaagaattaattgtttggtgt

SEQ ID NO: 14161 - DNA, 201 bp, Homo sapiens
accctaagtggcaggtacactcacgctcaaagtagataatttttctaacctttccttccaaaaagtacctacctttgggtattttgccaccatctggagayagtttttggcagatgttgagcagacaactaagaattaattgtttggtgtattccatatttccctgctcttgtggcaagggttctaaacatcttcaggaca

SEQ ID NO: 14162 - DNA, 201 bp, Homo sapiens
tatttccctgctcttgtggcaagggttctaaacatcttcaggacacccaaaagagaaatgatgggaaatgtaaaagttgtacaattcattgttacattaayggccattgtccagaactcattcaataaggaactcattcaataaggaataactaaaatactatcattaaacatcaagtctagaaataagatataagatttc

SEQ ID NO: 14163 - DNA, 201 bp, Homo sapiens
atcattaacgcttaccggaaatattccagcaacagtgcccaaaagtaaaagggcatggtgatgggtctgcggcatctccgaaaggcggatgcactgaactrtcaactccacgttgaacttctcctcatctaaaatatctacaatggtgagaaagacaaaaaccctaagtggcaggtacactcacgctcaaagtagataatt

SEQ ID NO: 14164 - DNA, 201 bp, Homo sapiens
gtcttgttaataacttgaaaactgtaagtatcatctaggcgcatgacattggctcccataaatgtaaaaatagacatgatattgtgtaaaactttatcctraaagaaaacacaactatcaacattttttatttctgttaatttctactaatttttttttcaagagatagcgtctcgctccgtcattcaggctgggatgcag

SEQ ID NO: 14165 - DNA, 201 bp, Homo sapiens
tctgttaatttctactaatttttttttcaagagatagcgtctcgctccgtcattcaggctgggatgcagtgcagttgtgtgatcacagttcactgaaaccytggactcctaagctcaagcaatccttccacctcagcctcctgagtagctaggactacaggtgcatgctaccctgcccagctaattttttttccttttctg

SEQ ID NO: 14166 - DNA, 201 bp, Homo sapiens
gatgttttgctgcaactgaggatattcagagtgctatgggctctgaatgcaattttttaaaatgccaaaaacctttttgaaaaaggttctgagcaaaaagrttctaaataacacacattaggcatcatcagccccatgtttaaactggacaatatcataaaatctgtgtgagaaatcaccattttccttatcttcccaccc

SEQ ID NO: 14167 - DNA, 201 bp, Homo sapiens
cagcaaacggcagctgaaggcactcagagaacttgttcatgtctaccttatgctaaatgtttcaagtagaaagacgagttaaataattctgtactaaattrtttcaaaaactactcggaaagaaaggaaatgagggattattgccatagacagagatcatcaagaagtaactaggcgcttctgtgcagaagcatcgacctc

SEQ ID NO: 14168 - DNA, 201 bp, Homo sapiens
acctaccttatctaacaggtcgtaagctttactaaggagcgcgcgccagaacttcacggtgagtttgtctgcgttcctttccatggactgtgcaactgcaytgatatagccgagaacggtctccagcaacctgaaacacagaggctcgctcagcaaacggcagctgaaggcactcagagaacttgttcatgtctaccttat

SEQ ID NO: 14169 - DNA, 201 bp, Homo sapiens
aaacatgtcatggtattatattcagataataatatacttcaatttgaaattgtaccactagagaaattgaagggagttaaatgcagctctttgataaagcraagtacagtaaatgggtgtgtcctgggtcttcactcactattgtcttcttccaggatatattttgctgcagcttgttattcaaaaggtccagcgctttgc

SEQ ID NO: 14170 - DNA, 201 bp, Homo sapiens; identical to SEQ ID NO: 13784

SEQ ID NO: 14171 - DNA, 201 bp, Homo sapiens; identical to SEQ ID NO: 13785

SEQ ID NO: 14172 - DNA, 201 bp, Homo sapiens
ccccatgtttaaactggacaatatcataaaatctgtgtgagaaatcaccattttccttatcttcccaccctaggttctgaccttttcgccacaggcagccrccagcactgtttttgtgacatactgttcaaaaagcaagatgaggagaatccagaggaatttctctgcacccagtgtatcaacaagttgaacaaggatggg

SEQ ID NO: 14173 - DNA, 201 bp, Homo sapiens; identical to SEQ ID NO: 13786

SEQ ID NO: 14174 - DNA, 201 bp, Homo sapiens; identical to SEQ ID NO: 13788

SEQ ID NO: 14175 - DNA, 201 bp, Homo sapiens; identical to SEQ ID NO: 13789

SEQ ID NO: 14176 - DNA, 201 bp, Homo sapiens
cttcagaaataagactcctttctgtcaaacggaaactaacccttaaagaaaaaacaaaatcactacatttgtgatcttttaccttccccagccaccctgcrtagcatgtcgtggctatcgtggctcacctgggagagaatgccttccagataggggctgatgaagtgcgggagagtctccacaaccttctgcagagcagcc

SEQ ID NO: 14177 - DNA, 201 bp, Homo sapiens; identical to SEQ ID NO: 13828

SEQ ID NO: 14178 - DNA, 201 bp, Homo sapiens; identical to SEQ ID NO: 13829

SEQ ID NO: 14179 - DNA, 201 bp, Homo sapiens; identical to SEQ ID NO: 13830

SEQ ID NO: 14180 - DNA, 201 bp, Homo sapiens; identical to SEQ ID NO: 13831

SEQ ID NO: 14181 - DNA, 201 bp, Homo sapiens; identical to SEQ ID NO: 13832

SEQ ID NO: 14182 - DNA, 201 bp, Homo sapiens; identical to SEQ ID NO: 13833

SEQ ID NO: 14183 - DNA, 201 bp, Homo sapiens; identical to SEQ ID NO: 1579

SEQ ID NO: 14184 - DNA, 201 bp, Homo sapiens; identical to SEQ ID NO: 1579

SEQ ID NO: 14185 - DNA, 201 bp, Homo sapiens; identical to SEQ ID NO: 13836

SEQ ID NO: 14186 - DNA, 201 bp, Homo sapiens
attattatttctttaagagacagggtctcactctgttgcccaggctacagtgcagtggtgcagtcatagctcactgcagcctcaaactcctgggctcaaaygatctccctgccttggcctcccaaagtggtgggatcacagccgtgagccaccacaccctgcaagatcaattctttaacaaattccaattttatgcaacgt

SEQ ID NO: 14187 - DNA, 201 bp, Homo sapiens
actctgttgcccaggctacagtgcagtggtgcagtcatagctcactgcagcctcaaactcctgggctcaaacgatctccctgccttggcctcccaaagtgstgggatcacagccgtgagccaccacaccctgcaagatcaattctttaacaaattccaattttatgcaacgtctactcagaggaaaaaaaaaaaaagtcac

SEQ ID NO: 14188 - DNA, 201 bp, Homo sapiens
gaatgcattggctcgatcttggctcactgcaagctatgcctcccgggttcacgccattctccttcctcagcctcccgagtagctgggactacaggcgcccrccaccacgcccggctaattttttgtattttttagtagagaccatgttagccaggatggtctcgatctcctgacctcatgatccgcccgcctcggcctccc

SEQ ID NO: 14189 - DNA, 201 bp, Homo sapiens
catcaggagatcgagaccatcctggctaacacggtgaaaccccgtctctactaaaaatacaaaaaaattagccgggcgtggtggcgggtgcctgtagtccyagctactcgggaggcggaggcaggagaatggcatgaacccaagaggcagagcttgcagtgagctgagatcgcgccactgcactccagcctcggcaacaga

SEQ ID NO: 14190 - DNA, 201 bp, Homo sapiens
gtgaaaccccgtctctactaaaaatacaaaaaaattagccgggcgtggtggcgggtgcctgtagtcctagctactcgggaggcggaggcaggagaatggcrtgaacccaagaggcagagcttgcagtgagctgagatcgcgccactgcactccagcctcggcaacagagcgagactccgtctcaaaacaaacaaacaaaca

SEQ ID NO: 14191 - DNA, 201 bp, Homo sapiens
ctttggattctgattcaaagaaaacaactataaaaaatacttttgtgataaccatggaaatatgattatgaactaggtattagataataccaaggaattatttttttttttacttctaatggcattgtagtcatatccacttttcaaaagatgcacactgaagtacagagggatgaaagtgcatgacattatgagatttac

SEQ ID NO: 14192 - DNA, 201 bp, Homo sapiens
ttaggcatatgttacctggtgcattcttttgaaaatacacaagagcatactataaactctgttctacaccaactgctatcacatatgagctggacattgckcaatggtgcaatctcggctcactgcaacctccgcctcctgggttcaagcaattctcctgcctcagcctcttgagcagctgggattacaggtgcacgccac

SEQ ID NO: 14193 - DNA, 201 bp, Homo sapiens
tgaggttggagtcaaacttcctaatgtttccaaatggatagccagatgtcccatttaacaatccacataaccatctcacagatctttgattttgcctttaytatattcatacattccataagtatttgaaacttgtctatttctgccggctagtacttctagaatcatgttcaatgagagtgatgatttcagcaggaatgc

SEQ ID NO: 14194 - DNA, 201 bp, Homo sapiens
ttctattattaaacttttgtgtttggtgagattttgctagtgccagtaacttaaaagcaatacttagaagtgaccagaaatatgtatagatgtacagcccttttttttttttttttgagacagggtcttgctctgttgcccagtttggagtgcagtggtgcaatcacagctcactgcagccttgacctcccaggcacaagc

SEQ ID NO: 14195 - DNA, 201 bp, Homo sapiens
ggagtgcagtggcacaatctcggctcactgcaacctccaactccctggttcaagcaattctccagcctcagcctcccaagtagctgggattacaggcacaygccaccacgcccagctaatttttgtatttttagtagagacggggtttcaccatgttgcccaggatggtcttgatctcctgacctcatgatctgcctgctt

SEQ ID NO: 14196 - DNA, 201 bp, Homo sapiens
tccctggttcaagcaattctccagcctcagcctcccaagtagctgggattacaggcacatgccaccacgcccagctaatttttgtatttttagtagagacrgggtttcaccatgttgcccaggatggtcttgatctcctgacctcatgatctgcctgcttcggcctcccaaagtgctgggattacaggcgtgagataccgc

SEQ ID NO: 14197 - DNA, 201 bp, Homo sapiens
tcacactgcagtttagtggatttgaaaggctagaaccataggtccataaaacagaacagaacttgaataactgaaaaacatcttctagatgcacctaattaaaaaaaaaaaaaagcaaacttttaattcttactcaaataagctggttccaaatcctcttctcactagtgtacaattataaagaaacaaataatttaaggc

SEQ ID NO: 14198 - DNA, 201 bp, Homo sapiens
tatagtaatgggcctaacatattagtaggagtgtagcaatgttagtttctattcaacctaccgattagtattgtgattgtactcttttacagggcccgtghtattatatactcttcactgtttacaagtctacttttgtttacattataaactgtcataacccaaataacccacagtatctttttatttatttattatttt

SEQ ID NO: 14199 - DNA, 201 bp, Homo sapiens
accacacccggctaattttttttgtatttttcgtagagacggcgtttcaccatgttagccaggatggtctcgatctcctgacctcgtgatccacccacctyggcctcccaaagtgctcggattataggcgtgagctactgcgcccagcccatcttttttttttgagacagagtctcactcttgtcacccaggctggagtac

SEQ ID NO: 14200 - DNA, 201 bp, Homo sapiens
ccatgttagccaggatggtctcgatctcctgacctcgtgatccacccaccttggcctcccaaagtgctcggattataggcgtgagctactgcgcccagccyatcttttttttttgagacagagtctcactcttgtcacccaggctggagtacggtggtgtgatctcggctcactgcaacctctgcctcccgggttcaagcg

SEQ ID NO: 14201 - DNA, 201 bp, Homo sapiens
gcgcccagcccatcttttttttttgagacagagtctcactcttgtcacccaggctggagtacggtggtgtgatctcggctcactgcaacctctgcctcccrggttcaagcgaattctcctgcctctgcctcccaagtggctgggattacaggccccatcaccatgcctggctaatttttgtatttttagtagaaatggagt

SEQ ID NO: 14202 - DNA, 201 bp, Homo sapiens
ttttatctatgtcttaccttgaaacattatctctaaaaacaaactttattcatatgaactgtttatccaataaagggtaggaataaataggcatatttctttttttttttttttttttgagacggagtcttgctctgtcacccaggctggagtgcagcggcacaatctcagctcactgcaacctccgcttcccaggttcaa

SEQ ID NO: 14203 - DNA, 201 bp, Homo sapiens
gagtcttgctctgtcacccaggctggagtgcagcggcacaatctcagctcactgcaacctccgcttcccaggttcaagcaattctactgcttcagcctccsgagtaggaaggattacaggtgcccgccatcatgcctggctaatttttgtatctttagtagagattaggtttcaccattttggccaggttggtctcgaact

SEQ ID NO: 14204 - DNA, 201 bp, Homo sapiens
aaatatgactctgtacaagcagtacagagtaataacttagaaggaaaataatccaaagccagatttacaatgtaacgtctccagtgagggatttgattaastcaacgtgctgctacaggcgaaaacatgctcatgacctcgagaaaggtattaaaagtaaagcaatataaaataacctgttatctacatatgtataataaa

SEQ ID NO: 14205 - DNA, 201 bp, Homo sapiens
tgaaaaaatatataaaatgttaaaagatttcaaacattgcacagaatatattaaacaacactgcaacgtttaaagtaaaaccaagtactcaagaataaaaraaattttttttaagaaaaatctagtaaagcaaaagctgagaatttaataagagtatgagaaagaaatccagggggtggactttcaaagcatacttaccat

SEQ ID NO: 14206 - DNA, 201 bp, Homo sapiens
cagcctcttaatagagggtgcagggagcagattcctgattttgataaatatatagcaattttcatctcagcagattccgtatcatcattattgataaccayaaatggcagcaaacatacaaccacctgatttgacaactgatcattttcactcagtatctcttctttaattaatatgtcagcggctatcttaagtacctcg

SEQ ID NO: 14207 - DNA, 201 bp, Homo sapiens
tttcaaagaaacattctcaaagatctaaatgttgtttgttgtttatatatcaacttaaaattaagtataactccttcttaaaatatagatgacataaaacaaaaatttttttttaaatctacaagggaaatactaaaaactctataaaaccaataaaattcaaatgaagatgaacttagtgtgattagttgtaattagctg

SEQ ID NO: 14208 - DNA, 201 bp, Homo sapiens
ctcacacccaagagatcctcctacctcagcctctcaagtagctgggaccaaagcgtgtgccaccaaacttggctaattttttattttttgaacttttttayagagaagggggtctccctatgttgcccaggttggtctcaaacgtttgggctcaagtgatccttctcacagagtgctgggattataggcatgagctgctgt

SEQ ID NO: 14209 - DNA, 201 bp, Homo sapiens
cagagaaaaccaccccaaattgcccaacattttcagtaacaaccatctaactacagaaaacaaacaaaaaaatgcaaaatctttgtttctagaacatcacatgagttgatgaaaaaatttgtattgttaatggtatgatttcatgtatacttgtgtctatgtgtaggtttaatttagtcaagtaattctacaaagtaattt

SEQ ID NO: 14210 - DNA, 201 bp, Homo sapiens
agagaaaaccaccccaaattgcccaacattttcagtaacaaccatctaactacagaaaacaaacaaaaaaatgcaaaatctttgtttctagaacatcacatgagttgatgaaaaaatttgtattgttaatggtatgatttcatgtatacttgtgtctatgtgtaggtttaatttagtcaagtaattctacaaagtaatttt

SEQ ID NO: 14211 - DNA, 201 bp, Homo sapiens
ataagtatcacgttcatagttatgtacaaattattgtacctttctccaattattctattcctgcctcagagccgtacttcaggcaactaggcaaactgtakaaggttatctctgtaaaattttccacacaagggaaaaaagtggcaaatttccttctggagctcttcacatacccatacaaatgtaccccaaattgtcata

SEQ ID NO: 14212 - DNA, 201 bp, Homo sapiens
aactgatggaaaagctcttgttttttcagatctgcaatttcctttaagtgttcctctaatacaacatctaatgttctggggtatctgggaagcaattaaaragtgaattcattattcttaataaatttattaatctcatacaccatacacatataaaggaaagacataaaatcttaaaaattactgagactgtgacttaaa

SEQ ID NO: 14213 - DNA, 201 bp, Homo sapiens
caataacaaaatagtctctctataaaaaattatactctccatagcccccacacaaccactatttcctcttatatttcaaatatttttgattccgatactcrccccttcttgaagaacaaatttaaaaaggacagtctctgtacaattcagtatattaagatgtgacttgtgaatcatatctttatagaacaggaagtactt

SEQ ID NO: 14214 - DNA, 201 bp, Homo sapiens
aaaaggacagtctctgtacaattcagtatattaagatgtgacttgtgaatcatatctttatagaacaggaagtactttagaagagcataaacatacacacrtaacttacttgctttctaaaagcctaatgagtggaagaaattgttcattaagcaaagacactttattagaatccatttcttcctgtgaactatatgaaat

SEQ ID NO: 14215 - DNA, 201 bp, Homo sapiens
gtttaatacttattttacagataaagaaactagaggcctggtgtagtggttcacaccactggcattataatcccagcactttcggaggccggggcaggagractgcttaaggtcaggagttcgagacctgtctgaacaacatagtaagactacattgctattttaaatggtgctggctcacgcctgtaatcccagtacttt

SEQ ID NO: 14216 - DNA, 201 bp, Homo sapiens
aggtcaggagttcgagacctgtctgaacaacatagtaagactacattgctattttaaatggtgctggctcacgcctgtaatcccagtactttgggaggccraggtgggcggatcacctgaggacaggagttcgagatcagcctgaccaacatggtgaaaccttgtctctactaaatatacaaaattagctgggcatggtgg

SEQ ID NO: 14217 - DNA, 201 bp, Homo sapiens
acctgtctgaacaacatagtaagactacattgctattttaaatggtgctggctcacgcctgtaatcccagtactttgggaggccaaggtgggcggatcacmtgaggacaggagttcgagatcagcctgaccaacatggtgaaaccttgtctctactaaatatacaaaattagctgggcatggtggcacatgcctgtaatcc

SEQ ID NO: 14218 - DNA, 201 bp, Homo sapiens
atttactaagagaaaacttcaaacggccacaaactgcatttagttattacccaaatttgtcttaaccactaactttccattttcatctataagcactaaasacatgcaagaaaaattacttttgcttttaatgctgccagttactggattaagtacttatagttaatgaaatgatacagacaaaacaagatatacattaaa

SEQ ID NO: 14219 - DNA, 201 bp, Homo sapiens
agaaaaattacttttgcttttaatgctgccagttactggattaagtacttatagttaatgaaatgatacagacaaaacaagatatacattaaaaaggaatrctgggaaatttctaaccaatcttgaaaattatactgagtcacaaaaatgtaaatcaaaagcatgtcaaaaataatagcttacctagccaacaaatggtct

SEQ ID NO: 14220 - DNA, 201 bp, Homo sapiens
ttcttctccttaatatgtaaaaattaaaattgtgttgggaaaaatttattttgcaagctaacattattaaattcacttatagcagaaaatcgttctcagartaaaacacacacactgatatccagctttttatctatttgcacaagtgcattccacttatttagtcatttatattttttaaagctcttttgtatagatcac

SEQ ID NO: 14221 - DNA, 201 bp, Homo sapiens
tttcataatttggatttttatgtataaaaattttcttggtcttatatttttaattactctagggaaaaaacttttttggcaactggatgagatattcattrtaaatgaatcactaaagttcattaaatacctaaatgagaaggcaaaggtttactcagtaataaattttaaaagtattccagtctttttcatgtagagact

SEQ ID NO: 14222 - DNA, 201 bp, Homo sapiens
ttttaagatcaaatcttagaaaatttctggacaaaaaatataaaaccacacacctgtaacatgatgaatgatggagacgaccagatggggaagcatgtaaygcagaagaggactgacatcgtaagtttcagaaatcccatgaagtattgtaataagatcaggaacattacataagtgagggaatggcctttgaagaagcaa

SEQ ID NO: 14223 - DNA, 201 bp, Homo sapiens
agtgagggaatggcctttgaagaagcaaaagtacatatcgtgttgactttacaagttagacaatgagtaacaatataagaaaatatataatcacttatctyacaaaaaaaaattattcaaaataattttattcacctctgactagcaccatttctcaattcaattgtacatactttttcccaaggctctctggcttctgtc

SEQ ID NO: 14224 - DNA, 201 bp, Homo sapiens
gaaggattgcttgaggccaggagttcaaggctgagatttcaatgaactatgatggcaccactgtactctagcctgggcgacaaagcaagtccatgtctccaaaaaaaaaaaaagtgaaaggccaaataaatatttacagctctcctgaattaccatatgcaacaatgaatacacaatgtgacaacaattaactgcctaatg

SEQ ID NO: 14225 - DNA, 201 bp, Homo sapiens
ggctggagtgcagtggcacaatctcggctcactgcaacctccacctccaagtttaaaagattctcctgcctccgcctcccaagtagctgggactacaaackcataccaccatgcccagctaattttttttttttactttagtagagatggggtttcaccatgttgcccaggctggtctccaactcctgagctcaggcaatc

SEQ ID NO: 14226 - DNA, 201 bp, Homo sapiens
ggtgtgatctcagctcactgcaaccttcgcctcccaagttcaagcgattctcatgccctagcctcccaagtagctggaattacaggtgcacagcaccacamccagctaatttttttttgtatttctagtagagacagggattcaccatgttggtcaggctcgtctcaaactcctgatctcaagtgactggcctgcctcagc

SEQ ID NO: 14227 - DNA, 201 bp, Homo sapiens
tgttctgacaatcagaagacccaagttaaaatcatgttttcttgatgactcacttgcttcttgaaaaaaaattagtttatccccacgtctccattttttgttttttttttttgatacggcgtctccctgttacccaggctggagtgcagtggcgtgatctcagctcactgcaaaatctgtctcctggattcaagcaattct

SEQ ID NO: 14228 - DNA, 201 bp, Homo sapiens
tggcgtgatctcagctcactgcaaaatctgtctcctggattcaagcaattctcctgcctcagcctcccaagtagctagaattacaagtgctcgccactgcrcccagctaatttttgtatttttcacacagacaggttttaccatgctggccaggctggccttgaagccatgtctccaattaatggaatagaaatctacttt

SEQ ID NO: 14229 - DNA, 201 bp, Homo sapiens
ggattcaagcaattctcctgcctcagcctcccaagtagctagaattacaagtgctcgccactgcgcccagctaatttttgtatttttcacacagacaggtwttaccatgctggccaggctggccttgaagccatgtctccaattaatggaatagaaatctacttttaaaacatgtaagttggactggatgtggtggctcat

SEQ ID NO: 14230 - DNA, 201 bp, Homo sapiens
atttataatacagtcccaaacactgatttctagttttcaacttttagagtaaatcctatctcatctactagaacagaaagtacttcgtggcagggaacacttttttttttttttttttggatatcccctacaataactaggccagtcctctgagaggacttctccgtcaccccagtcactgcctccatcccccttttagct

SEQ ID NO: 14231 - DNA, 201 bp, Homo sapiens
ctttgggaagctcaggcgagctgatcacctgaggtcaggagttcgggaccagcctggccaacatagcgaaaccccgtctctactaaaaataaaagaattasccggacgtggtggcgggcgcctgtaatcccagctactaggaaagctgagacagaagaatcgctggaacccgggagtcggaggttgcagtgggccaagatt

SEQ ID NO: 14232 - DNA, 201 bp, Homo sapiens
gcaaaattaccatgtatgctgtttgatcaagattttcatgtaattgtgttctatcagaaataatgatcaaaaaggattaaaaataaaatttaattatattccaaacatatagtttgaatgtttcaataaaaatataaattaaattaaaaagcaatacattaaatctttttcacttttttcaaaagatttacctttcttata

SEQ ID NO: 14233 - DNA, 201 bp, Homo sapiens
attaccatgtatgctgtttgatcaagattttcatgtaattgtgttctatcagaaataatgatcaaaaaggattaaaaataaaatttaattatattccaaacatatagtttgaatgtttcaataaaaatataaattaaattaaaaagcaatacattaaatctttttcacttttttcaaaagatttacctttcttataagatg

SEQ ID NO: 14234 - DNA, 201 bp, Homo sapiens
taccatgtatgctgtttgatcaagattttcatgtaattgtgttctatcagaaataatgatcaaaaaggattaaaaataaaatttaattatattccaaacayatagtttgaatgtttcaataaaaatataaattaaattaaaaagcaatacattaaatctttttcacttttttcaaaagatttacctttcttataagatgta

SEQ ID NO: 14235 - DNA, 201 bp, Homo sapiens
aataacttagaattattctaactataataaaagtaaaattttcacaaacttcaaagtttaattattagtagagtgtttacatcatatatcacaactgatgkgataccatccacttgaaaatatatctgttgctgggctcagtggctcacgcttgtaaacccagcaggttgagaggccaaggctggcatatcgcttgagccc

SEQ ID NO: 14236 - DNA, 201 bp, Homo sapiens
ttagtagagtgtttacatcatatatcacaactgatgggataccatccacttgaaaatatatctgttgctgggctcagtggctcacgcttgtaaacccagcaggttgagaggccaaggctggcatatcgcttgagcccaggaattcaagaccagtctgagcaacatggggaaactccacctctgcaatgagcacaaaaatta

SEQ ID NO: 14237 - DNA, 201 bp, Homo sapiens
gattgagaagtatgtgtttcatcatattgcatcccaaacaaatttatttgcatttttataagcttgagcacttgtgctcttgctaccaaaaaatttataattttttttttttttttttttttggttattttgaaatgtactgggagggagctaggaattaaaaaaaaaaaaaaagatttggaaatcaacaggagcaagttc

SEQ ID NO: 14238 - DNA, 201 bp, Homo sapiens
accccaggataatttttgtatttttagtaaagaaggagtttcaccatgttggccaggctggtctcaaactcctgacctcaagtgatctgcctgcctcaaactcccaaagtgctaggattacaggtgtgagccaccgtgcccagccactagtattttttatagtgaaattctatgttgtggctggtttcgagacccagtaag

SEQ ID NO: 14239 - DNA, 201 bp, Homo sapiens
ccccaggataatttttgtatttttagtaaagaaggagtttcaccatgttggccaggctggtctcaaactcctgacctcaagtgatctgcctgcctcaaactcccaaagtgctaggattacaggtgtgagccaccgtgcccagccactagtattttttatagtgaaattctatgttgtggctggtttcgagacccagtaagc

SEQ ID NO: 14240 - DNA, 201 bp, Homo sapiens
cccaggataatttttgtatttttagtaaagaaggagtttcaccatgttggccaggctggtctcaaactcctgacctcaagtgatctgcctgcctcaaactcccaaagtgctaggattacaggtgtgagccaccgtgcccagccactagtattttttatagtgaaattctatgttgtggctggtttcgagacccagtaagcc

SEQ ID NO: 14241 - DNA, 201 bp, Homo sapiens; identical to SEQ ID NO: 13837

SEQ ID NO: 14242 - DNA, 201 bp, Homo sapiens
aactgaattttttaccttcttcccagcctcttaatagagggtgcagggagcagattcctgattttgataaatatatagcaattttcatctcagcagattcygtatcatcattattgataaccataaatggcagcaaacatacaaccacctgatttgacaactgatcattttcactcagtatctcttctttaattaatatgt

SEQ ID NO: 14243 - DNA, 201 bp, Homo sapiens
ccattttcccattgtcacagcttgagattgtctaaatggaaatcagactcgggggtcctgagtcacacagtcatgctaagcgatgtgcatgttctagccastgtttcacttatacaaagcacccactgatctggagtaaaagggacttagaactatgctaaggctaaggccacgtaagctctgtagtaagcaagaattcca

SEQ ID NO: 14244 - DNA, 201 bp, Homo sapiens
taatgacactttcaagcttctttatttttttctgcaacaaactgaagactcttatcgcaaatggaaagtgggtttcttttaaagatgaacaacaagagacragcacagacaggatcacatgaaacgttactttctgcttcaggttaaaggactcctcctcacccacgcttattaaatcctccaccttgaaaaataaacaca

SEQ ID NO: 14245 - DNA, 201 bp, Homo sapiens
ctgggaatttgggtatatcttggaaggcaacaactcttcacagcgcttcccacatggtaccaaggagcccaaccctcacccggaaacctaaggcatgctgyagagcaacttcctgctgcaggcgctacggcaagtgaagaggttcaagcttgccgggaatgcgacgagacagctccgcctcccgagacgaaagcccgcccc

SEQ ID NO: 14246 - DNA, 201 bp, Homo sapiens
cttctgcactcagcaccgtcatggacacacaacgcgggtgtcctgagatttgtggaccccggagatgcaaagacgatggcagcagcgttaacaactaattmcagtagcggcgaccgcgccaaggctttccttcaaccctgattccgcagatatccggaaaactcttaccctccctcgatatgccgcccccatccgcagcca

SEQ ID NO: 14247 - DNA, 201 bp, Homo sapiens
agcgttaacaactaattacagtagcggcgaccgcgccaaggctttccttcaaccctgattccgcagatatccggaaaactcttaccctccctcgatatgcygcccccatccgcagccacatcaagcggctctgtgccgcttacctggaactgggaatttgggtatatcttggaaggcaacaactcttcacagcgcttccca

SEQ ID NO: 14248 - DNA, 201 bp, Homo sapiens
tttctaagttaaaagatggctcaccaatggcgaaggcggtgtccctgtcgattgtggccgcttccttagggtcaaataacaaagaagcaacttcatctctrgataagaggctggcatcactttgagggagggcgagtcgttgcagctgctgggctaaggacgtcatctttcacgccagcggagttttaatgacacgggcta

SEQ ID NO: 14249 - DNA, 201 bp, Homo sapiens
aaaaaaacagtaacatccagaaaacaaacgcttccaagagcttttctaagttaaaagatggctcaccaatggcgaaggcggtgtccctgtcgattgtggcygcttccttagggtcaaataacaaagaagcaacttcatctctagataagaggctggcatcactttgagggagggcgagtcgttgcagctgctgggctaagg

SEQ ID NO: 14250 - DNA, 201 bp, Homo sapiens
taaaaatacaaaattagccgggcgtggtggtgcgtgcctgtagtcccagctactcaggaggctgaggcaggagaatcacttgaaaccaggaggcagaggtygcagtgacccaagatcatgccattgcactctagcctgggcaacaagagcaaaactctgtctcaaacaaacaaaagaaacaatacatgtgtgaaaagataa

SEQ ID NO: 14251 - DNA, 201 bp, Homo sapiens; identical to SEQ ID NO: 13845

SEQ ID NO: 14252 - DNA, 201 bp, Homo sapiens; identical to SEQ ID NO: 13846

SEQ ID NO: 14253 - DNA, 201 bp, Homo sapiens; identical to SEQ ID NO: 13847

SEQ ID NO: 14254 - DNA, 201 bp, Homo sapiens
tctaagaaaaatctgagcttcattatattcataaaaggaattgctaagtttattcttaaaaactttacataatttcacaataatttaaaaaacagcaacaraacagtaattccagggagaaatgaacacctaccttatctaacaggtcgtaagctttactaaggagcgcgcgccagaacttcacggtgagtttgtctgcgt

SEQ ID NO: 14255 - DNA, 201 bp, Homo sapiens
ctctgcaggcagttgtaaaaagataaatttttccatttattaatatggaaagatgtccatattaattgaaaaattaaagttaaaaaatgtatagagttgtycttatccaaatataactagaaaaaccttaacagtaaactcacctaaaataaagaccgaaattttgtaagcgaataaaaaattacttttgtggaattttat

SEQ ID NO: 14256 - DNA, 201 bp, Homo sapiens
gtcacattacaaattagttgtgatggtgccaatcaactatctctgaaaagaggttaaacttttatctcagtacccacccccttactgaaccaaaagctgtyatctatttcagatttataataaacatatgaatctgatcttagcccttgctttcaaagactgggacattactcattaccttcagaataggaagaatacatt

SEQ ID NO: 14257 - DNA, 201 bp, Homo sapiens
ttttttcctaattaaatcccttaatcaagatctgtaatgattacagacatatgtcattcagcaattataccttaactggcaacaaccagaaccatctgtgytttgaattattaatttttagaagctgtatgactcgcacaaatattcttgtctcgtggtatggcagaacacaagcaatgaggctatcttgattatagagat

SEQ ID NO: 14258 - DNA, 201 bp, Homo sapiens
cttcctatgtcagctgtgatggtgtatagtgccatgccgaattttactttggaaagtaaaaaggaaaacaagtcagatgttcataaatgtaattttttttwaaaaaaaagctttggttttaaaaaaaatgtaataatcttgaattatatatttttatctgacggacagatgtaccaagctggtattttcttcatagccatt

SEQ ID NO: 14259 - DNA, 201 bp, Homo sapiens
aggagttttttccttttttttattttttttattttttcagacagaatctcgctctgtcacccaggttggtggaatgcattggctcgatcttggctcactgmaagctatgcctcccgggttcacgccattctccttcctcagcctcccgagtagctgggactacaggcgcccgccaccacgcccggctaattttttgtattt

SEQ ID NO: 14260 - DNA, 201 bp, Homo sapiens
gtgagtttgtctgcgttcctttccatggactgtgcaactgcactgatatagccgagaacggtctccagcaacctgaaacacagaggctcgctcagcaaacrgcagctgaaggcactcagagaacttgttcatgtctaccttatgctaaatgtttcaagtagaaagacgagttaaataattctgtactaaattatttcaaaa

SEQ ID NO: 14261 - DNA, 201 bp, Homo sapiens; identical to SEQ ID NO: 13852

SEQ ID NO: 14262 - DNA, 201 bp, Homo sapiens
attcccgcaaccactggtcttggcctcactacagatagtgttgcggaagagtatccttatgtatgaatatagctaatctgtttccaaaacaccggtatgckctagaactaggatgaactgacgtcttccagacgaaggagtgagatctgatgctctgtcttttctggatgcattaatttctctgaagagctctgcggggcc

SEQ ID NO: 14263 - DNA, 201 bp, Homo sapiens
gaggcggaggcaggagaatggcatgaacccaagaggcagagcttgcagtgagctgagatcgcgccactgcactccagcctcggcaacagagcgagactccrtctcaaaacaaacaaacaaacaaacaaaaacattatgctaagcaaaagaaaccagacacagagggccacatattgtatgactcaatttatatgacatgtc

SEQ ID NO: 14264 - DNA, 201 bp, Homo sapiens
ggcctatctggactatttttcaaaatatgaagattttactctttttaaagtttacacattttagctaacaatggccatgatcagaacttataaaatcctgygggtatacgtaaatgtgaaaaagatataattcatttagtaaatcctataatgagaagccctctaaaatttggaggacaaataaaaacaaaatccttacat

SEQ ID NO: 14265 - DNA, 201 bp, Homo sapiens
cgtatcattcaatgtccacctagttgccagtgtaaagaattggtatcaccctttgttcatgttatgtctgtatctacctattttcaaatttcagagtcatstgaattgtttaatattgttaaatgttcctcagcaaccatatctgattgttgagaattctacactaattcctgagtatatccagaaccataaattgggggg

SEQ ID NO: 14266 - DNA, 201 bp, Homo sapiens
caacaaatacttcataaaataaaataatggtaaagatttaaaatttttattttatgcctctctctgacttacttttccatgatttttgttaatggtaacayctgacctcttacaagcactataaaatacaggactcttaaacatggtgtcccttggaagagactataaacattaataaaaaaaattacaagaagtttgcag

SEQ ID NO: 14267 - DNA, 201 bp, Homo sapiens
atagaaacaatgacagaggagattcttgtccctgactgtagcaggcacaccattaatatttcatcattaggtatgatataaaccacaagcttcagattgtyacctttattaggccaaagtaattcccatctatcctgcactgctgagaggagttttttccttttttttattttttttattttttcagacagaatctcgctc

SEQ ID NO: 14268 - DNA, 201 bp, Homo sapiens
tccaaaacttactatagccctggaagtggtaggcgcagaatttacacctatgtctgaccacaacgcctacatcttttcactgtatcgagttgcccattaaragaaaaaaaaaaaaaaaaaaaaaaagactgaattatctttaaagaaataatccttactctatgcttaccttcaatattgtttctaaatgacatttactgc

SEQ ID NO: 14269 - DNA, 201 bp, Homo sapiens
ataaatgctggactccaccgccccagagcttgggggagatcttgtcactcctctatgtttccattcccgaggggtaaatggcatatatttttttctttcaraacgaatcatagtcaggcgcggcctgtaatccgagcactttgggaagctcaggcgagctgatcacctgaggtcaggagttcgggaccagcctggccaaca

SEQ ID NO: 14270 - DNA, 201 bp, Homo sapiens
aattttctcctctttgggattatattttgctattttaacaacaacaacaacaaaaagactaatattttaaatgggaatgagaaaaaatggtggtaaaaagsatatattattcttatgggtgtgatatggatccacattgaaaaaatatataaaatgttaaaagatttcaaacattgcacagaatatattaaacaacactgc

SEQ ID NO: 14271 - DNA, 201 bp, Homo sapiens
cagattgtcacctttattaggccaaagtaattcccatctatcctgcactgctgagaggagttttttccttttttttattttttttattttttcagacagartctcgctctgtcacccaggttggtggaatgcattggctcgatcttggctcactgcaagctatgcctcccgggttcacgccattctccttcctcagcctcc

SEQ ID NO: 14272 - DNA, 201 bp, Homo sapiens
atatatttttatctgacggacagatgtaccaagctggtattttcttcatagccattatcactacttgaaatgacctgatttgtctgtttgtttacctgttkatttcttgtattccctcactataatattggcttcagcacgttggcataaagcccatccctaagacttatggagcctgagaaagagtacagatggactcac

SEQ ID NO: 14273 - DNA, 201 bp, Homo sapiens
cctgagtgcccagcaagactctatctcaaaaaaaaactaatgaggttagaccatttactcaaaatcaccagtagttctacttttcactatcaacaaaaaakaatttaaaggcagaagagcatgcttatctcacacaatggacattgtatcaatctcttaatatacctaatttttcagctttaatttgataagttctcaact

SEQ ID NO: 14274 - DNA, 201 bp, Homo sapiens
tatttttgattccgatactcgccccttcttgaagaacaaatttaaaaaggacagtctctgtacaattcagtatattaagatgtgacttgtgaatcatatckttatagaacaggaagtactttagaagagcataaacatacacacgtaacttacttgctttctaaaagcctaatgagtggaagaaattgttcattaagcaaa

SEQ ID NO: 14275 - DNA, 201 bp, Homo sapiens
caaaacttactatagccctggaagtggtaggcgcagaatttacacctatgtctgaccacaacgcctacatcttttcactgtatcgagttgcccattaagaraaaaaaaaaaaaaaaaaaaaaaagactgaattatctttaaagaaataatccttactctatgcttaccttcaatattgtttctaaatgacatttactgcgt

SEQ ID NO: 14276 - DNA, 201 bp, Homo sapiens; identical to SEQ ID NO: 13855

SEQ ID NO: 14277 - DNA, 201 bp, Homo sapiens
ccatctatcctgcactgctgagaggagttttttccttttttttattttttttattttttcagacagaatctcgctctgtcacccaggttggtggaatgcaytggctcgatcttggctcactgcaagctatgcctcccgggttcacgccattctccttcctcagcctcccgagtagctgggactacaggcgcccgccaccac

SEQ ID NO: 14278 - DNA, 201 bp, Homo sapiens
catacacatataaaggaaagacataaaatcttaaaaattactgagactgtgacttaaattttaacaaatgttgtaggtaaaaccaaatgacattggtcaartgtgttactatgactactccaataacaaaatagtctctctataaaaaattatactctccatagcccccacacaaccactatttcctcttatatttcaaat

SEQ ID NO: 14279 - DNA, 201 bp, Homo sapiens; identical to SEQ ID NO: 13896

SEQ ID NO: 14280 - DNA, 201 bp, Homo sapiens; identical to SEQ ID NO: 13897

SEQ ID NO: 14281 - DNA, 201 bp, Homo sapiens; identical to SEQ ID NO: 1570

SEQ ID NO: 14282 - DNA, 201 bp, Homo sapiens; identical to SEQ ID NO: 1578

SEQ ID NO: 14283 - DNA, 201 bp, Homo sapiens; identical to SEQ ID NO: 1581

SEQ ID NO: 14284 - DNA, 201 bp, Homo sapiens; identical to SEQ ID NO: 1581

SEQ ID NO: 14285 - DNA, 201 bp, Homo sapiens; identical to SEQ ID NO: 1582

SEQ ID NO: 14286 - DNA, 201 bp, Homo sapiens; identical to SEQ ID NO: 1582

SEQ ID NO: 14287 - DNA, 201 bp, Homo sapiens
catctgaaaaggaggtacacagcaaggccaggaggcaaaccccgaggacatgggagagaaaggaaaattcctgcacccaaatatataatggcagcatatgrattagaatccacagaataaagaattcatgagcccatagaaatcagggccagattaagacactaaacagatactgcaactcaatacaatacacagacttga

SEQ ID NO: 14288 - DNA, 201 bp, Homo sapiens
ctgtagcaggcacaccattaatatttcatcattaggtatgatataaaccacaagcttcagattgtcacctttattaggccaaagtaattcccatctatccygcactgctgagaggagttttttccttttttttattttttttattttttcagacagaatctcgctctgtcacccaggttggtggaatgcattggctcgatc

SEQ ID NO: 14289 - DNA, 201 bp, Homo sapiens
attacattcttcaaacatgctgtgcacattcctagatcatgccttttctcatactattggctctgccatcactgaacaaatcccatccttctttcacaccrgtacaaattctatttcttatagaactttctggtcatcctggcccatatagactttcccctattctgaactctttagcatttacttattcgactggcactg

SEQ ID NO: 14290 - DNA, 201 bp, Homo sapiens
gactgcttcttagcttcaatgttctaaaacttaagggcaatgtacttcagcatttcagaaaggcttttatacaactgttgaggatattaaaaaaaaaaaamaaaaaaaaaaaactaaaaaaaaggcttttaatgtcatttatatgcaaaatttttaaattaaaaaaagaaaccccacgatggtataaagagaccttacctg

SEQ ID NO: 14291 - DNA, 201 bp, Homo sapiens
gcttcaatgttctaaaacttaagggcaatgtacttcagcatttcagaaaggcttttatacaactgttgaggatattaaaaaaaaaaaacaaaaaaaaaaamctaaaaaaaaggcttttaatgtcatttatatgcaaaatttttaaattaaaaaaagaaaccccacgatggtataaagagaccttacctgaataagtgcggg

SEQ ID NO: 14292 - DNA, 201 bp, Homo sapiens
catgatttctttaaatgacatagtttatgatcaaattaattttctgaagtcactggttaaaggttactttgaggattacttgaggataaatgagatattarcttttcccaattaacaccaatacctactgttttattagatagatagtgtgccaggtattatgctaagtactaaccacaaattatccaactgaattccccc

SEQ ID NO: 14293 - DNA, 201 bp, Homo sapiens
gtgccagtgcatttctgtggaagaaaaatatctgaaatatctgctaaaatcttatatcattaacgcttaccggaaatattccagcaacagtgcccaaaagyaaaagggcatggtgatgggtctgcggcatctccgaaaggcggatgcactgaactatcaactccacgttgaacttctcctcatctaaaatatctacaatgg

SEQ ID NO: 14294 - DNA, 201 bp, Homo sapiens
ctagtccacctgtaactatcttctccaaataaaatattaatctttttttttttaacgctgttcctgttgccttctacctttaaatgcttgaacatgctatsccttagtttctgaaagaaatcactgaccttttcaagggctgtgatctgaatggttggcattcccgcgtaaagttcctttgttgtgtgcacagcttttata

SEQ ID NO: 14295 - DNA, 201 bp, Homo sapiens
tctggtcctttacccaagaaatttgtcaattattaatttaaactataccagggacaactaagggctgaatgcaacctgtttgttcctaccaagaaagtgtratcaaatggtcttcaatccatttggctcattttagttctctaagcccacagtcagtctaggactgatgaagcacacaggcatttctgtaacactgggatg

SEQ ID NO: 14296 - DNA, 201 bp, Homo sapiens
acacagatgtacagatattgacctatcagttcctaaatccaatgacttagtccatcaaaatccctacacagtgaaatgtcgagaatggagaaaattgctcsagtacacagaggcatgaacacactcaatcttctttgctaacgagcttacctgaataacataggcagcatctgaagtgatctcctctgctttagaaatcaa

SEQ ID NO: 14297 - DNA, 201 bp, Homo sapiens
tcaaataagctggttccaaatcctcttctcactagtgtacaattataaagaaacaaataatttaaggcaaagttttgctttgtctaatcatttcaaattaytccatattccatgttttaatgaactgggaagatgtcaatgaagagtgatattcagaagcctcactataaccttgcacttgaaaacacagaaccaagacaa

SEQ ID NO: 14298 - DNA, 201 bp, Homo sapiens
taatgaactgggaagatgtcaatgaagagtgatattcagaagcctcactataaccttgcacttgaaaacacagaaccaagacaagagcagtatctgggacrcctaattaagaaaatacttcaacaatgtgctgagcaatgccaactccatgtcaaatgctgtagagagaacaagtcaggcaagaacaggaactgaccactg

SEQ ID NO: 14299 - DNA, 201 bp, Homo sapiens
gcgatctccgctcactgcaagctccacctcccaggttcatgccattctcctgcctcagcctcccgagtagctgggacttcaggagcccgccaccacacccrgctaattttttttgtatttttcgtagagacggcgtttcaccatgttagccaggatggtctcgatctcctgacctcgtgatccacccaccttggcctccca

SEQ ID NO: 14300 - DNA, 201 bp, Homo sapiens
ttggcctcccaaagtgctcggattataggcgtgagctactgcgcccagcccatcttttttttttgagacagagtctcactcttgtcacccaggctggagtrcggtggtgtgatctcggctcactgcaacctctgcctcccgggttcaagcgaattctcctgcctctgcctcccaagtggctgggattacaggccccatcac

SEQ ID NO: 14301 - DNA, 201 bp, Homo sapiens
tttatttattttttgtacaagtgctgggattacaggcatgagccactgtgcctggccaacaatacttttaatctgctcatcctgtctaatcttaaaaaaawaataataatttttcttagagaaatcactagaggttaactataacataagacatatcacactagatgtctcaactctaccggaaatcaggttcactcaggc

SEQ ID NO: 14302 - DNA, 201 bp, Homo sapiens
tagaaagtcctacccatcttacttcccagaatgcaatatcatacattatatacttccttttgcattttattaagagaaattccaaacatagagaacagtayaatgaacacacacaaacacaaattaattaactgtataatgaaagagagtattacagtaagatctgttctactaccacgacaaaagggtcatgtaatcaaa

SEQ ID NO: 14303 - DNA, 201 bp, Homo sapiens
taagaatgtctaatttaaatcctagctctaccacttactagttgtgtaactttagtcaagtcacttaacctttctggatctcactattctcacctataaarcaggtttgctaataaataatacctacctgcaagggttgttagaagattaaaaaatacatgtcagtctgtagcacagtgctttacacatagtactgttaaa

SEQ ID NO: 14304 - DNA, 201 bp, Homo sapiens
accccaaattgtcataattcctttggagaacaacatacctgatactttcctccacttgtagaaagagaaacaaactgatggaaaagctcttgttttttcakatctgcaatttcctttaagtgttcctctaatacaacatctaatgttctggggtatctgggaagcaattaaaaagtgaattcattattcttaataaattta

SEQ ID NO: 14305 - DNA, 201 bp, Homo sapiens
tgtagtggttcacaccactggcattataatcccagcactttcggaggccggggcaggagaactgcttaaggtcaggagttcgagacctgtctgaacaacayagtaagactacattgctattttaaatggtgctggctcacgcctgtaatcccagtactttgggaggccaaggtgggcggatcacctgaggacaggagttcg

SEQ ID NO: 14306 - DNA, 201 bp, Homo sapiens
agtggttcacaccactggcattataatcccagcactttcggaggccggggcaggagaactgcttaaggtcaggagttcgagacctgtctgaacaacatagyaagactacattgctattttaaatggtgctggctcacgcctgtaatcccagtactttgggaggccaaggtgggcggatcacctgaggacaggagttcgaga

SEQ ID NO: 14307 - DNA, 201 bp, Homo sapiens
gctgaggcaggagaatcgcttgaacctgggaggcggaggttgcagtgagccgagattgtgccattgcactccagcctgggcaataagagcgaaactccatyttaaagaaaaaaaaaaaaggaaaagaaactagagtgtaagtcttccaatttgctcatgagaacagcaataaaaggcaacattcagtaagcccttctgtgc

SEQ ID NO: 14308 - DNA, 201 bp, Homo sapiens
ccgcctcccaggttcaagcgattttcctgcctcagcctcccgagcagctggaattacaggcatgccccaccatgcccagtttattttcgtatttttagtaragacggtgtttcaccatgttggccaggctggtctcaaactcctgacttcaagtgatccgcctgccttggcctcccaaagtgttgggattacaggcgtgag

SEQ ID NO: 14309 - DNA, 201 bp, Homo sapiens
taggtctcctgagtagctgggaccacaggggagcaccatcacagctggctaattttttatttctgtgtagagactaggtctccctgtgttgcccaggctgrtctgtcaacattttttttttttttttttttttttttttgagagggagtcttgctgttgcccaggctggagtgcagtggcacaatctcggctcactgcaac

SEQ ID NO: 14310 - DNA, 201 bp, Homo sapiens
cctgagctcaggcaatctacctgcctcagcctcccaaagtgctaggactacaggtgtgagccaccatgcctggctaagatgttttttctaattctgccaaytgatccctcttctgtgaaaactctcctatccttttacatcgtgtactttttttaaacagtaccatacattgccttttattagatttttttttttttccag

SEQ ID NO: 14311 - DNA, 201 bp, Homo sapiens
ctccagcctgggtgagtgaaatcctgacactcaataaaataaaaataaaaagacagccgtgtgcagtggctgtggtggctcacaccagcactttgggaggytaagacgagtggatcacgaggtcaggagtttgagaccagcctggccaacgtgatgaaaccccatctttactaaaaaaaaaaaaatacaaaaaattaactg

SEQ ID NO: 14312 - DNA, 201 bp, Homo sapiens
ttttttcaaaagatttacctttcttataagatgtaaagtataattagtgacaatattttttttttgttttgagatggagtcttgctctgtcgcccaggctsgagtgtggtggcgtgatctcagctcactgcaacctccgcctcccaggttcaagcaatcctctgcctcagcttctcaagtagctgggattacaggtgcctg

SEQ ID NO: 14313 - DNA, 201 bp, Homo sapiens
gagtttgagaccagcctggccaacatggtgaaaccccatctctactaataatactaatcctgactctactaaaaaaaaattggccgggcgtggtggcgcaygcctgtaatcccagctactagggaggctgaggcaggagaatctcttgaaccgggaggtggaggttgcagtgagccgacatcgcgccgtttgcactccagc

SEQ ID NO: 14314 - DNA, 201 bp, Homo sapiens
gccacagtagtgctaaatggcaggttttgaaaggcaggttcccacatttttaagcaaatttattttgtatgatttgtgatatgcagagatcacgatctaargatgatgttgaagactttctcgtgtttactactaaatcctaactaccaaataaagtacctggaacgtggttaacaatacatatttatttatcgaatgaat

SEQ ID NO: 14315 - DNA, 201 bp, Homo sapiens
cagagggagtcgcaaaaagtaaaaataaagaaagaaagaaaaataacgagaaaagaaataggatgtgtgtaattagcaatgtaaagtcaacatatgaaatytacattttggcaatatgctaaaaaaaattgactagttaaatgattgagaagtatgtgtttcatcatattgcatcccaaacaaatttatttgcatttttat

SEQ ID NO: 14316 - DNA, 201 bp, Homo sapiens
cgatggcatcaggctagaaacaaagtaagagctttagaagaacttgaagcagaaacagaggctagggaatggagtagagggcattatgaaaaaaaccagcwaactgtgcctattacatcgctatctgcttcatagcctaaaaagcagtgtctatacattttatgtggctaagcacaagaaatctcccagtgctaacagtac

SEQ ID NO: 14317 - DNA, 201 bp, Homo sapiens
gcagcttacccctttaaaaacactgctgacagtctgagcacaatgtgagtttttacagttcaccaataaatcaaacaacattcttaaaagcttctgctgamctttttcatctgatatggctgcaaaaaatggttttgtaatctagagggggtagaaaaaaggcaactgagttcagtgaacaagtttaaattccagaaataa

SEQ ID NO: 14318 - DNA, 201 bp, Homo sapiens
atttacagctctcctgaattaccatatgcaacaatgaatacacaatgtgacaacaattaactgcctaatgatattcctaacatttttatttaaaaaaaaawtttttttttttttttttgagatggagtctctgtcgcccaggttgcagtacagtggcatgatcttgggtcactgcaacctccgcctcccaggttcaagcga

SEQ ID NO: 14319 - DNA, 201 bp, Homo sapiens; identical to SEQ ID NO: 13904

SEQ ID NO: 14320 - DNA, 201 bp, Homo sapiens
tattatcaaatggtgaacctggttgtaaagagtatatgaattttctgtactgtttttccaggttttctataagtttgaagtcatttccaaataaaaagtaraaaaagaaaaggaaacatacctctcttcaaggccttttaaaatctcaggaccaccactctcaactacctaatttttaaagaagacgtcattagaacggta

SEQ ID NO: 14321 - DNA, 201 bp, Homo sapiens
aaaaagaaaaggaaacatacctctcttcaaggccttttaaaatctcaggaccaccactctcaactacctaatttttaaagaagacgtcattagaacggtakggaagtcaataataaaagtcatttcaagtcagttcaatgaaactcggaccattcactgaaaccttccacagcaactgttttctgacattacaatttaatc

SEQ ID NO: 14322 - DNA, 201 bp, Homo sapiens
taataaaagtcatttcaagtcagttcaatgaaactcggaccattcactgaaaccttccacagcaactgttttctgacattacaatttaatcaggttcatakcatcttcattatactgtagtaactctatttctcttaatttattttaattacattctactggtagtatctaaaaagtactacaatggttcagaaaaataca

SEQ ID NO: 14323 - DNA, 201 bp, Homo sapiens
accttccacagcaactgttttctgacattacaatttaatcaggttcatatcatcttcattatactgtagtaactctatttctcttaatttattttaattayattctactggtagtatctaaaaagtactacaatggttcagaaaaatacagcaatcaacactcaattagcactaccgaattctatgacatgctgagctggt

SEQ ID NO: 14324 - DNA, 201 bp, Homo sapiens
accagatcacaggaattactggaactttcaacctcatgggatcctgccaattgctttctaaagtggttggaacaatcacactgtctgccactacgtacccmatccctggtactaacgacttcaacagttttgccaatttgatgggtatcacatttaatcacatttcctgcttactggaggctaaatgacattgtacattaa

SEQ ID NO: 14325 - DNA, 201 bp, Homo sapiens
gagaaaaatgaaaattcacagaattcacaaaaattaagttagtcaggcacagtggtgcatgtctataatcccagctactctggaggctgaggtgggaggaytgcttaagcccaggagtttgaggccagcctggataacatagcaagaccccatcatttaaacaaatcctcaagagctaataagcagccatatatctgaacc

SEQ ID NO: 14326 - DNA, 201 bp, Homo sapiens
tactttaaatgtaacaaaatttggttacaaatgtaattatgtgctctttcaaagaactaacaaaaaataaacactgaggaattgttcagggaaaagtataygatcatctaacttgctttcacagaacatttacaaagagtaattttggaattaaaaaaaaaacaacaagaaacaaaacaaaaaaaaaccaaggacatcttc

SEQ ID NO: 14327 - DNA, 201 bp, Homo sapiens
ttttttttggttattttgaaatgtactgggagggagctaggaattaaaaaaaaaaaaaaagatttggaaatcaacaggagcaagttcctgaaacatctttrgaaaccggcaggtggcaccaaagcattttcctgaccccagagggcattcagggtatccccagttgcctcatggaagtatcagttttcacactttttaaaa

SEQ ID NO: 14328 - DNA, 201 bp, Homo sapiens
aatgattgagaagtatgtgtttcatcatattgcatcccaaacaaatttatttgcatttttataagcttgagcacttgtgctcttgctaccaaaaaatttawaattttttttttttttttttttttggttattttgaaatgtactgggagggagctaggaattaaaaaaaaaaaaaaagatttggaaatcaacaggagcaag

SEQ ID NO: 14329 - DNA, 201 bp, Homo sapiens
ggatcgcttgaggccaggagttccagaccagcctgggcaacaaagtgagacactgtctctacaaaaaatggaaaaacaaaaacaaaaacaaacaaacaaamaaaaaactaggtgggcatggtggtgcatgcctgtaatcccagctacttgggtggctgagatcggaggatcatttgagccctggagatcgagtgggccacg

SEQ ID NO: 14330 - DNA, 201 bp, Homo sapiens
gggaggatcaattgagcctgggaggcagaggttgaagtgagctgaaattgcaccactgaactccagcctgggtaccagagggagtcgcaaaaagtaaaaakaaagaaagaaagaaaaataacgagaaaagaaataggatgtgtgtaattagcaatgtaaagtcaacatatgaaatctacattttggcaatatgctaaaaaa

SEQ ID NO: 14331 - DNA, 201 bp, Homo sapiens
tgctggactccaccgccccagagcttgggggagatcttgtcactcctctatgtttccattcccgaggggtaaatggcatatatttttttctttcaaaacgratcatagtcaggcgcggcctgtaatccgagcactttgggaagctcaggcgagctgatcacctgaggtcaggagttcgggaccagcctggccaacatagcg

SEQ ID NO: 14332 - DNA, 201 bp, Homo sapiens
ttcaagcaccaagcacctgactgttatgttctctttcccttaaaaatatacatcaacatgctagaaactgctaaggaagaggacgggacagaagagaaaasaaggggaaaaaaaaaaaacagtaacatccagaaaacaaacgcttccaagagcttttctaagttaaaagatggctcaccaatggcgaaggcggtgtccctg

SEQ ID NO: 14333 - DNA, 201 bp, Homo sapiens
aatgctgtgagaattaaatgagataatgcagataaagtgcttaccagggcctagtgtataaatgctcaaaaacacattagctatcattgtttttctcaagyaatggtatttcagaggataacattgcctgcttccccaaccatcttgttattttgccaagaaagcagcttagtactcactgcctcaagtgtgcaggaacaa

SEQ ID NO: 14334 - DNA, 201 bp, Homo sapiens
actttttccatgaagctttcttcaactattccaggcagaactatatccacaaaactctgcttaatcctttattatggcatttatttcaaaacagtaatcarcggcaacctacttatctatgtactgaacttagtatttgctgaataaataagttatctgaagacataaaatgaaaaatcaaatgcaaaaagtattccttac

SEQ ID NO: 14335 - DNA, 201 bp, Homo sapiens
atgacataaaacaaaaatttttttttaaatctacaagggaaatactaaaaactctataaaaccaataaaattcaaatgaagatgaacttagtgtgattagytgtaattagctgaaattaaattttactgatcatatgattttacttgtagtaagaatctgcttctaattgctatgacacaagttctagagttcggcacgtt

SEQ ID NO: 14336 - DNA, 201 bp, Homo sapiens
aactgagtagctgggactacaggcacgcaccatcacgcccagctaatttttgtattttttgtagaggcaggatctcatcacgttgtccaagctggtcttgwactcttggcctcaagtgatcctcctgccttagcctcccaaagtgctgagactataggtgtaagccacctcgcctggcctttatcgatttttttttttttt

SEQ ID NO: 14337 - DNA, 201 bp, Homo sapiens
acaaaaccatcatcccaaatctgcttccaaatgtttcaaacactacatatcacggaacaacatgtttttctggaaacatatttttgagatctatgcatggkgacttatgttctagttccttcattttaactgcatatgatattcctctataaataccacttatctatccatttgcctctgttgttagatgtttagtttatg

SEQ ID NO: 14338 - DNA, 201 bp, Homo sapiens
tccctctaccccaagccccacaaacaaaaccatcatcccaaatctgcttccaaatgtttcaaacactacatatcacggaacaacatgtttttctggaaacrtatttttgagatctatgcatggtgacttatgttctagttccttcattttaactgcatatgatattcctctataaataccacttatctatccatttgcctc

SEQ ID NO: 14339 - DNA, 201 bp, Homo sapiens
catatcctttgttgagaagttaaacattacagattcagctggaatcccccaagtactgctccttggtcctattctccctctaccccaagccccacaaacamaaccatcatcccaaatctgcttccaaatgtttcaaacactacatatcacggaacaacatgtttttctggaaacatatttttgagatctatgcatggtgac

SEQ ID NO: 14340 - DNA, 201 bp, Homo sapiens
aattacattctactggtagtatctaaaaagtactacaatggttcagaaaaatacagcaatcaacactcaattagcactaccgaattctatgacatgctgakctggtgagctcacatatcctttgttgagaagttaaacattacagattcagctggaatcccccaagtactgctccttggtcctattctccctctaccccaa

SEQ ID NO: 14341 - DNA, 201 bp, Homo sapiens
caggcactttccagtggaaggggcaggacagtggccctgggaatgccatgcatctgaaaaggaggtacacagcaaggccaggaggcaaaccccgaggacawgggagagaaaggaaaattcctgcacccaaatatataatggcagcatatggattagaatccacagaataaagaattcatgagcccatagaaatcagggcca

SEQ ID NO: 14342 - DNA, 201 bp, Homo sapiens
cactaggctgaaattccattctaagagctcttacaacacacatatattcccgttagaattaacgtcacattttaaaacatgtcatggtattatattcagawaataatatacttcaatttgaaattgtaccactagagaaattgaagggagttaaatgcagctctttgataaagcaaagtacagtaaatgggtgtgtcctgg

SEQ ID NO: 14343 - DNA, 201 bp, Homo sapiens
tctctggagcaatcagtttcacagcagtgttcagcactgggacaaaaggatctggattttctgcaccaaaattcttgcataaaagctttaaggtatacaaygctgtctgtctgttgattgcttgttcttcttccccttcctttttcttacgctgcacaatggccaaaaggtctggaaccagttttaggaaacgggtaacct

SEQ ID NO: 14344 - DNA, 201 bp, Homo sapiens; identical to SEQ ID NO: 13905

SEQ ID NO: 14345 - DNA, 201 bp, Homo sapiens; identical to SEQ ID NO: 13906

SEQ ID NO: 14346 - DNA, 201 bp, Homo sapiens; identical to SEQ ID NO: 13907

SEQ ID NO: 14347 - DNA, 201 bp, Homo sapiens; identical to SEQ ID NO: 13908

SEQ ID NO: 14348 - DNA, 201 bp, Homo sapiens; identical to SEQ ID NO: 13909

SEQ ID NO: 14349 - DNA, 201 bp, Homo sapiens; identical to SEQ ID NO: 1585

SEQ ID NO: 14350 - DNA, 201 bp, Homo sapiens; identical to SEQ ID NO: 1585

SEQ ID NO: 14351 - DNA, 201 bp, Homo sapiens; identical to SEQ ID NO: 1583

SEQ ID NO: 14352 - DNA, 201 bp, Homo sapiens; identical to SEQ ID NO: 1583

SEQ ID NO: 14353 - DNA, 201 bp, Homo sapiens; identical to SEQ ID NO: 1580

SEQ ID NO: 14354 - DNA, 201 bp, Homo sapiens; identical to SEQ ID NO: 1580

SEQ ID NO: 14355 - DNA, 201 bp, Homo sapiens; identical to SEQ ID NO: 1576

SEQ ID NO: 14356 - DNA, 201 bp, Homo sapiens; identical to SEQ ID NO: 1575

SEQ ID NO: 14357 - DNA, 201 bp, Homo sapiens; identical to SEQ ID NO: 1574

SEQ ID NO: 14358 - DNA, 201 bp, Homo sapiens; identical to SEQ ID NO: 1573

SEQ ID NO: 14359 - DNA, 201 bp, Homo sapiens; identical to SEQ ID NO: 1572

SEQ ID NO: 14360 - DNA, 201 bp, Homo sapiens; identical to SEQ ID NO: 1569

SEQ ID NO: 14361 - DNA, 201 bp, Homo sapiens; identical to SEQ ID NO: 1568

SEQ ID NO: 14362 - DNA, 201 bp, Homo sapiens; identical to SEQ ID NO: 13923

SEQ ID NO: 14363 - DNA, 201 bp, Homo sapiens; identical to SEQ ID NO: 13924

SEQ ID NO: 14364 - DNA, 201 bp, Homo sapiens; identical to SEQ ID NO: 13925

SEQ ID NO: 14365 - DNA, 201 bp, Homo sapiens
ggtacacagcaaggccaggaggcaaaccccgaggacatgggagagaaaggaaaattcctgcacccaaatatataatggcagcatatggattagaatccacrgaataaagaattcatgagcccatagaaatcagggccagattaagacactaaacagatactgcaactcaatacaatacacagacttgacatggatcatgat

SEQ ID NO: 14366 - DNA, 201 bp, Homo sapiens
gagaaaggaaaattcctgcacccaaatatataatggcagcatatggattagaatccacagaataaagaattcatgagcccatagaaatcagggccagattragacactaaacagatactgcaactcaatacaatacacagacttgacatggatcatgatgcagaaacacatgcggtgtaaaggagagtgttgggataatta

SEQ ID NO: 14367 - DNA, 201 bp, Homo sapiens
aaatcagggccagattaagacactaaacagatactgcaactcaatacaatacacagacttgacatggatcatgatgcagaaacacatgcggtgtaaaggasagtgttgggataattagggagactggagtatgaactgtagattacatcactggattggatcaatgttaaattttctgaatttgatcaatgtactgtggtt

SEQ ID NO: 14368 - DNA, 201 bp, Homo sapiens
atctggattttctgcaccaaaattcttgcataaaagctttaaggtatacaacgctgtctgtctgttgattgcttgttcttcttccccttcctttttcttaygctgcacaatggccaaaaggtctggaaccagttttaggaaacgggtaacctgaaggggacagccagaatccccaaatcattaaagctgcaaaaaatgttt

SEQ ID NO: 14369 - DNA, 201 bp, Homo sapiens
gaaattgaagggagttaaatgcagctctttgataaagcaaagtacagtaaatgggtgtgtcctgggtcttcactcactattgtcttcttccaggatatatyttgctgcagcttgttattcaaaaggtccagcgctttgcggcgaacagatggcaggggattgcccaccagccctctgatcacaggaatgaatgtctctgtg

SEQ ID NO: 14370 - DNA, 201 bp, Homo sapiens
tgctaaatgtttcaagtagaaagacgagttaaataattctgtactaaattatttcaaaaactactcggaaagaaaggaaatgagggattattgccatagasagagatcatcaagaagtaactaggcgcttctgtgcagaagcatcgacctcgctcagactctgtgaggtgctgaataagcaacagatgctgaaagcgttta

SEQ ID NO: 14371 - DNA, 201 bp, Homo sapiens; identical to SEQ ID NO: 13950

SEQ ID NO: 14372 - DNA, 201 bp, Homo sapiens; identical to SEQ ID NO: 13951

SEQ ID NO: 14373 - DNA, 201 bp, Homo sapiens
tccagacaaatctatttctagtcatcaagagattgttttctaagaaaaatctgagcttcattatattcataaaaggaattgctaagtttattcttaaaaastttacataatttcacaataatttaaaaaacagcaacaaaacagtaattccagggagaaatgaacacctaccttatctaacaggtcgtaagctttactaag

SEQ ID NO: 14374 - DNA, 201 bp, Homo sapiens
tgcagggcaggcactttccagtggaaggggcaggacagtggccctgggaatgccatgcatctgaaaaggaggtacacagcaaggccaggaggcaaaccccraggacatgggagagaaaggaaaattcctgcacccaaatatataatggcagcatatggattagaatccacagaataaagaattcatgagcccatagaaatc

SEQ ID NO: 14375 - DNA, 100 bp, Homo sapiens; identical to SEQ ID NO: 13952

SEQ ID NO: 14376 - DNA, 100 bp, Homo sapiens; identical to SEQ ID NO: 13953

SEQ ID NO: 14377 - DNA, 100 bp, Homo sapiens; identical to SEQ ID NO: 13953

SEQ ID NO: 14378 - DNA, 201 bp, Homo sapiens
cacagaggcatgaacacactcaatcttctttgctaacgagcttacctgaataacataggcagcatctgaagtgatctcctctgctttagaaatcaaatgayctattatcagataaaacggggatgccactccactgagggcctggagacactgaatggcagccctacgaacttcttttacggggcttcccaggttaatgag

SEQ ID NO: 14379 - DNA, 201 bp, Homo sapiens; identical to SEQ ID NO: 13963

SEQ ID NO: 14380 - DNA, 201 bp, Homo sapiens
gcacacaccaaattccaacacagctgccactggagatccccccactgctgccagcctgaggggggagctagagggaagagtggagacagaagttgacaccrcacagcagaggaggggagaagggggcgcagacaaaatcagctccaaaaacgaaagtcctacgcatagcgctacaagtcagcccacaggactggaactcag

SEQ ID NO: 14381 - DNA, 201 bp, Homo sapiens
tgtatttgccaagaaagtacccagtggccctgagaagcgagtgtttaagacaaaaaacaaaacagggaaactggacaatcaaatggaagaaaccacatcasggaaggagtctctgaacttccaactgcaggtgtagatttctttattcaatgtgtctaatgtaaatggggttggcagtgcagtgttaaaaaccactagcct

SEQ ID NO: 14382 - DNA, 201 bp, Homo sapiens
tgatcaaaatatagttgttgaataaatgacagaaagaatgacagaaaacacttgaatgaatgaataaaccaatgtctacctgtctcaaccctctgctctcyatcaatcaatcaccattacattcttcaaacatgctgtgcacattcctagatcatgccttttctcatactattggctctgccatcactgaacaaatcccat

SEQ ID NO: 14383 - DNA, 201 bp, Homo sapiens
aagtacagagggatgaaagtgcatgacattatgagatttactttaaaatatttcagcaaagaaaaagaaggaaaaaagattaatatgttaaaattctgagractgctgaatctagatactagaactttgtattattctatattcaaaaaagagaataaccaggtggctattctgataataacaaggtttcaatatacgtat

SEQ ID NO: 14384 - DNA, 201 bp, Homo sapiens
catttctgtaacactgggatgaaagaaccttttttatgttggtcagcacatgccatcacatcaacaagtgtttcacaactgctttcttttgtaacacaagyttcttcgaaaacacaatgaaagctctaaatatatataataaacgagcaaatgattttggaattttcatagactcgtgtccaaatatattcctttgtatag

SEQ ID NO: 14385 - DNA, 201 bp, Homo sapiens
aggttgtttctattcttttgtcatcaaaacaatgctgcaacaaacaccgctgcacatacagccttgtacaagcgtgcacgggaaattacccacctgtgcawcgtactctacaaatatttggtcccagactggtgtgttttgattttactttttgatagagaaatgttagagtcaagtttttcttctactttttttctggtg

SEQ ID NO: 14386 - DNA, 201 bp, Homo sapiens
tgttatgccagttttaaataaagaatctggaagcttcccttctctatgccctgcccagttcaacaacattgaaaaaatctgcttcaaagatctagtaggartgcatctgtgagaccaactgcgctagggtttttaaaaagatgtctttggaacaaagagatatctaaattccttttacagtaattagttatttaagcttta

SEQ ID NO: 14387 - DNA, 201 bp, Homo sapiens
gaatctggaagcttcccttctctatgccctgcccagttcaacaacattgaaaaaatctgcttcaaagatctagtaggaatgcatctgtgagaccaactgckctagggtttttaaaaagatgtctttggaacaaagagatatctaaattccttttacagtaattagttatttaagctttatttcatatctactgcagcaaac

SEQ ID NO: 14388 - DNA, 201 bp, Homo sapiens
ttgagctcttctacataatgtgcccacagctccactgggatccctctgtctaacatcagttcaatgtgccattctgaggggatttcctgaaatgttaaagraaacaaaaactagtacaaactaagggttctgaacatgggttatatgaattcctctgcataatatgcaaaagttttgtttatgtgtgcattttggtgggga

SEQ ID NO: 14389 - DNA, 201 bp, Homo sapiens
ggatttgattaactcaacgtgctgctacaggcgaaaacatgctcatgacctcgagaaaggtattaaaagtaaagcaatataaaataacctgttatctacayatgtataataaaacactctatttgtccatacttttaacactgagaaccagtatagttcaggtcatcatacttcacaaaagacaccaagaaactaaaagtt

SEQ ID NO: 14390 - DNA, 201 bp, Homo sapiens
aatttcagaaactgtaatgaacataattgcacttgccaactggttaatgtatttaaatcacacatctaatcctttacaaaggtttatttaataaggcaaarataattttctcctctttgggattatattttgctattttaacaacaacaacaacaaaaagactaatattttaaatgggaatgagaaaaaatggtggtaaaa

SEQ ID NO: 14391 - DNA, 201 bp, Homo sapiens
tcctgtctaatcttaaaaaaaaaataataatttttcttagagaaatcactagaggttaactataacataagacatatcacactagatgtctcaactctacyggaaatcaggttcactcaggcactcaaaaaaaatgaaccaagcacatcctacatgatagatatctacccatacgatagatacaaaaacacgtaagacaca

SEQ ID NO: 14392 - DNA, 201 bp, Homo sapiens
gtcccaaggtatttgctattgataaaaatatgttaaaagcaatataaaaattcacaaaacatttttcctgtttgaacaacttccatatatatttaatatawcaaattgtgaatttctgtgagtttctcctaaccagacttaagtctgtgctctccagagaacaaatttcccatggaaaaataatttccaaaaatattctag

SEQ ID NO: 14393 - DNA, 201 bp, Homo sapiens
gagattaataattgtttggtacaaatccttttcaagttttcagtgaaaatatagtaaatatggtatactccaaatatagtttttgtagttaaggagttcaycttattaaagtgagagcccagatattgacgggatatagactaaagaataagaatgtctaatttaaatcctagctctaccacttactagttgtgtaacttt

SEQ ID NO: 14394 - DNA, 201 bp, Homo sapiens
taatgagtccatctgaaataaagaaaaattgtgagaaaataatactactatcagtggtaatttgtaatttagcaaaaattgtacagggactgcttgaatgmctaaagtttggaaactactattctatgtgcatcattaccaagtcttcataccaatgccttttggtataaatgcaaattagaccaaattatttacaaataa

SEQ ID NO: 14395 - DNA, 201 bp, Homo sapiens
acattttaaagacaaacgaaactgcaggcaccaaaatcatggaacagtgttcaaaagttatcattcaaatgtcccaaaatatgtcttcatctaaaattaasactatcaaaatcaaatttctcggtttttttttgaaagagtcttgccctgtcacccaggctggagagcagtggcgtgatcatggctcgctgcagcctcaac

SEQ ID NO: 14396 - DNA, 201 bp, Homo sapiens
gagaaatactaaaacaatcatatttctcttcataattatctgtttttaaggctaaatataagaactcctgcttaaatgtctaacctctagtataaagcttyaggcttgaatcaccagaaaatttctcaagttttaatgtgatcatgaaatagaacccatctcccccttgctaatcaataatataaatagccatctgtggct

SEQ ID NO: 14397 - DNA, 201 bp, Homo sapiens
ctttaggcttgaatcaccagaaaatttctcaagttttaatgtgatcatgaaatagaacccatctcccccttgctaatcaataatataaatagccatctgtrgctggtacactggaaagcatagacctagatgaaagacagagaatgctagaaacctacatgaggccgtcctctgatgattcttaatgaatatcccatacaa

SEQ ID NO: 14398 - DNA, 201 bp, Homo sapiens
gtggctggtacactggaaagcatagacctagatgaaagacagagaatgctagaaacctacatgaggccgtcctctgatgattcttaatgaatatcccatamaaaattctcaaacaatacttttcctgaaataagtatcacgttcatagttatgtacaaattattgtacctttctccaattattctattcctgcctcagagc

SEQ ID NO: 14399 - DNA, 201 bp, Homo sapiens
catttagttattacccaaatttgtcttaaccactaactttccattttcatctataagcactaaagacatgcaagaaaaattacttttgcttttaatgctgycagttactggattaagtacttatagttaatgaaatgatacagacaaaacaagatatacattaaaaaggaatgctgggaaatttctaaccaatcttgaaaa

SEQ ID NO: 14400 - DNA, 201 bp, Homo sapiens
acttatagcagaaaatcgttctcagaataaaacacacacactgatatccagctttttatctatttgcacaagtgcattccacttatttagtcatttatatwttttaaagctcttttgtatagatcaccttcatttttcttttatctaaaattctctatttttaacaagtactatcatgcttataacaataacaaaacaaaa

SEQ ID NO: 14401 - DNA, 201 bp, Homo sapiens
tcatgcttataacaataacaaaacaaaagtccaaaattagtctttccccaggtcacattacaaattagttgtgatggtgccaatcaactatctctgaaaasaggttaaacttttatctcagtacccacccccttactgaaccaaaagctgtcatctatttcagatttataataaacatatgaatctgatcttagcccttgc

SEQ ID NO: 14402 - DNA, 201 bp, Homo sapiens
gactgattcttaaaaaaaaaaaaaaagatacggactctcaaactgctcctgcttcaaaacaccagaccatttaacaaaataaatttatccaaagtatcatygttattagggaatgttttagtatgttttcttcattcaaagcaagcaatcttttcataaaattatatactcatgaaacagactgctcaccttcacagattt

SEQ ID NO: 14403 - DNA, 201 bp, Homo sapiens
tcttaaattctccttctaattaaaaagtcctcattactcctatcttactaattctgaacactgaccccactaccatcatcagcctaatgtgcacagcctcrtgatctgttagcttaccttcatccccatttgcctccccccctaccctggatcaccatgcccaacatgcagtcaagttcctgctaacaacatacatctact

SEQ ID NO: 14404 - DNA, 201 bp, Homo sapiens
tacaatagcatgctgtcttttcttacccagacccttcctgttatacaagcatccttttcttagtctgtaaattaactcctagcatcttcctcacaactttrgtaaattcttgaaacccctgaagttatccttatccttttaatttttgtaagtattttctgcctttcttcaccttcaacttttttttaagttctcagttcc

SEQ ID NO: 14405 - DNA, 201 bp, Homo sapiens
atctcttaatatacctaatttttcagctttaatttgataagttctcaactacttaattttttacaagaccaaagtgattaacccatagttatttctgtaawtctattagctacctgtgaatcaaccactccagacacttctgtgctggcttaagcaggaagtaaggcgacaagtgaataaggaataatgaaatgttttcat

SEQ ID NO: 14406 - DNA, 201 bp, Homo sapiens
cccacccctcttttacagttttacttacccctaagaagtttctgaattctttaagtacatataatttataatacagtcccaaacactgatttctagttttmaacttttagagtaaatcctatctcatctactagaacagaaagtacttcgtggcagggaacacttttttttttttttttttggatatcccctacaataact

SEQ ID NO: 14407 - DNA, 201 bp, Homo sapiens
gccgaattttactttggaaagtaaaaaggaaaacaagtcagatgttcataaatgtaatttttttttaaaaaaaagctttggttttaaaaaaaatgtaatartcttgaattatatatttttatctgacggacagatgtaccaagctggtattttcttcatagccattatcactacttgaaatgacctgatttgtctgtttgt

SEQ ID NO: 14408 - DNA, 201 bp, Homo sapiens
aataatgccttcgaaggttgtttagagaactacaggacttaacaatatttagatattcttggctaatgagaatcattcaaagtcattgtttaataaatacmttaaatttagatgtgggtagcctgaatccctttcttctctcatcctcaccacattctaagttagcttctattgactatttgccactggggacacttctta

SEQ ID NO: 14409 - DNA, 201 bp, Homo sapiens
acagaggctcgctcagcaaacggcagctgaaggcactcagagaacttgttcatgtctaccttatgctaaatgtttcaagtagaaagacgagttaaataatyctgtactaaattatttcaaaaactactcggaaagaaaggaaatgagggattattgccatagacagagatcatcaagaagtaactaggcgcttctgtgcag

SEQ ID NO: 14410 - DNA, 201 bp, Homo sapiens
gataatccaagataatataatgtacattgcctagcctgatgtcagatactaaataaaagctaaatattattaacattaataatagtttcaattggaagtcrggaaataaaaatgatggaggtagttatctggactatccccaggagcaatgacttattttttcctaattaaatcccttaatcaagatctgtaatgattaca

SEQ ID NO: 14411 - DNA, 201 bp, Homo sapiens
tttctgaattctttaagtacatataatttataatacagtcccaaacactgatttctagttttcaacttttagagtaaatcctatctcatctactagaacaraaagtacttcgtggcagggaacacttttttttttttttttttggatatcccctacaataactaggccagtcctctgagaggacttctccgtcaccccagt

SEQ ID NO: 14412 - DNA, 201 bp, Homo sapiens
atgggaccaccaggtacatgcagtccatcattgatcaaaatgttattatgcagcatacgactttatcctcagcttagaggccatctccctctctgcccccragtcttccctacccattcctccccttctccagactgggttaactattcttcttctgtgcttccaaagcccccacactttacaccacatagtataactttt

SEQ ID NO: 14413 - DNA, 201 bp, Homo sapiens
gaagatgggaacctagcgccacccagcccaaggttggccctcataaccgctctccgcttcgaccaaagggcgagggttgcccgctcctagtctgccgctaygcccctttctcccacctcaggctcagtacccaccggtgggctgcggggctggagctggggccggcgggaacgcggagcctgggggtgggaacagcctccg

SEQ ID NO: 14414 - DNA, 201 bp, Homo sapiens
cctattcaataatttgtaatgtgtatcctttggaaaatagttcaggcagccacttcttaatctctgtaattagtgggaagccactgaagttaatctcttcyctgtctaagcatgtttgcactgaaaagagatttacaaggtaaataaagaccttgtttattaaagagatggttaggtgtagttttccctcacaaagaaaga

SEQ ID NO: 14415 - DNA, 201 bp, Homo sapiens
gcagtgcagggacctggtctcggttcactgcaaccttcccttcccgggctcaagcaatccacttgcctcagcctcctgaatagctgggactataagtgtgygccaccatacctgactaatttttgtattttctgtagagacagggttttgccatgttgctcaggctggcctcgaactcccgggctcaagtgatctacctgc

SEQ ID NO: 14416 - DNA, 201 bp, Homo sapiens
ctcctgcctcggcctcccaaagtgctgggattacaggtttgagccactgcgcctggcctttcctggcatttaaaatagctatgtccagtcttcagaacagycctgtggcgaggtatgatcatgaaacccacgttataaagtgaagaggaaacagattttataacttgcccaagatcatccagctaaatggagaagtggaga

SEQ ID NO: 14417 - DNA, 201 bp, Homo sapiens; identical to SEQ ID NO: 7997

SEQ ID NO: 14418 - DNA, 201 bp, Homo sapiens
aagcataccagggaggtcagaacttgggccaactccatgacttcaatggtagagaatggcacacgggccaaacaggatgcataccatcaccaagaagtgtyggggtctcaccggctaaagacatgttacaaaggtgccctcagtcacctgcccagagaataaagcagggcccaggcagggaaaaacacacaaggatactga

SEQ ID NO: 14419 - DNA, 201 bp, Homo sapiens; identical to SEQ ID NO: 8024

SEQ ID NO: 14420 - DNA, 201 bp, Homo sapiens; identical to SEQ ID NO: 8025

SEQ ID NO: 14421 - DNA, 201 bp, Homo sapiens
taatccagcacatgctacgactgtccctgagacagctgtctactgcccctaggcacttgggcaggggatctccttggagccagaaagttaataactggtcytgaagatacaaacaatgtcatggtctatgactttgtgacacgatgcaaaggaaagcgtttgggctttgagtcaggcagacccagattcatacctcagctc

SEQ ID NO: 14422 - DNA, 201 bp, Homo sapiens
ctcaggaggctaaggagggaggattgattgagccctggtgattgaggctgcagttagccatgatcacaccaagagagggaagaaggaaggtggctgtcagycactggtatcagagacaagcagaggacagagaagacaaatgcaaaatctttctttggctgggacttgtcagaaagggaatctccagtgttggtgatggtg

SEQ ID NO: 14423 - DNA, 201 bp, Homo sapiens
acaccaagagagggaagaaggaaggtggctgtcagtcactggtatcagagacaagcagaggacagagaagacaaatgcaaaatctttctttggctgggacktgtcagaaagggaatctccagtgttggtgatggtgtcaccaacagcctcatgtgccttatgtgtgggcatctctgaaggcagaaagaactccattttccc

SEQ ID NO: 14424 - DNA, 201 bp, Homo sapiens
tccagtgttggtgatggtgtcaccaacagcctcatgtgccttatgtgtgggcatctctgaaggcagaaagaactccattttccctggaggaaaatggaccwgtgagcatgaggctgaggtctgactcctgggggccacacaggcaggcctgagcaccttgcccctcctcactgaagggggcttaatgtctggggcacagtt

SEQ ID NO: 14425 - DNA, 201 bp, Homo sapiens
gacaaggtgaaaaggcaggctgggggggaaagggggaccagcagattaggccaagagtgtagcatcatgaaatgtgatgtcttcatgagaaatgcaaggamataaagcatttgctgtacatatctaacccgtatgagagagaccccacttcttcagaggaaagcataccagggaggtcagaacttgggccaactccatgac

SEQ ID NO: 14426 - DNA, 201 bp, Homo sapiens
agtagagacagggtttcaccatgttggccaggctggtctccaactcgtgacctcaggtgagccacccacctcggcctcccaaagtactgggattacaggcrtgagccactgtgcccggcccccacacacacttctcaaaagagtaatacctaagcttgaaatctatgaatgcacagcatgggccagtctgaatttccacct

SEQ ID NO: 14427 - DNA, 201 bp, Homo sapiens
atgcctgtaacaacaactaagtgaatggtttgctctgtttctcctgaagtaggatttcacagcatcaaacaaacctttgcatttttccttaagaccaaagrttcaatcactcttaatatctagaactattagctatcctttattcagttccagattgccttcataataatcatttgaaaattaccttggtgatctcatgtt

SEQ ID NO: 14428 - DNA, 201 bp, Homo sapiens
gcccctctgtgtatgggtgcagacactagctaataaacttgactgtttctttcttttgagacagagtctcactctgttgcccagactggagtgcagtggcrcacatggctcactgcagccttgacttcctgggctcaagcaatcctcccacctcagcctcccaagtagctgggactacaggctcatgccattatgcccagc

SEQ ID NO: 14429 - DNA, 201 bp, Homo sapiens
tctttcttttgagacagagtctcactctgttgcccagactggagtgcagtggcacacatggctcactgcagccttgacttcctgggctcaagcaatcctcscacctcagcctcccaagtagctgggactacaggctcatgccattatgcccagctaatttttgtattttttgtagagatggggtttcgccatgttgccaag

SEQ ID NO: 14430 - DNA, 201 bp, Homo sapiens
agtatgatgttgaaaataaatccttttttagactaattaattgtatgcttttgcttttcctcctcaccctgcttcacacttacagccctgaggttgcagayacacaaaaacaaaactgattttaaaaaagactaagaagtcctgtaataagtaaaacacagaattgccatacggtccagccattctaatcctgggtttaag

SEQ ID NO: 14431 - DNA, 201 bp, Homo sapiens
aaacaaaaatttgtgcacaaatgttcacagcagcactgttcacagcagccaaaaagtgaaaacaactcaaatattcatcaacagatgagtggagaaacatyatgtggtcaatccacacaatgaaatattactcggccattaaaaggaatgaagtactcgtacatactacaacatgggtgaatcttgagaacatcatgctaa

SEQ ID NO: 14432 - DNA, 201 bp, Homo sapiens
gcacaaatgttcacagcagcactgttcacagcagccaaaaagtgaaaacaactcaaatattcatcaacagatgagtggagaaacatcatgtggtcaatccrcacaatgaaatattactcggccattaaaaggaatgaagtactcgtacatactacaacatgggtgaatcttgagaacatcatgctaagcaaaagaagccag

SEQ ID NO: 14433 - DNA, 201 bp, Homo sapiens
aacttgaatccaggcagtccaactccagaggccctgttcttgaccagcatattatactgcatctctacaaaagctggtgcatataaagcttttggttcaayctggcaagttgttaacaataaattatggttactagcatgattgcaagattaacagtgatcatactggaagcagcattttcacccttgttaatactgttca

SEQ ID NO: 14434 - DNA, 201 bp, Homo sapiens
gtctcgaactcctgacctcatgatccgcccgcctcagcctcccaaagtgctgggattacaggtgtgagccactgcgcccgcctcagtgttataatcttatrggaccaccaggtacatgcagtccatcattgatcaaaatgttattatgcagcatacgactttatcctcagcttagaggccatctccctctctgcccccaag

SEQ ID NO: 14435 - DNA, 201 bp, Homo sapiens
atctccctctctgcccccaagtcttccctacccattcctccccttctccagactgggttaactattcttcttctgtgcttccaaagcccccacactttacrccacatagtataacttttcatttacttctctctctcactcaactgcaagcaacagaggcagtgactgagtctcatttacacttgtattgttggtgtctaa

SEQ ID NO: 14436 - DNA, 201 bp, Homo sapiens
ccttctccagactgggttaactattcttcttctgtgcttccaaagcccccacactttacaccacatagtataacttttcatttacttctctctctcactcwactgcaagcaacagaggcagtgactgagtctcatttacacttgtattgttggtgtctaacccagggtctggcacagcactgcaacagaactttcaacaat

SEQ ID NO: 14437 - DNA, 201 bp, Homo sapiens
tctgccttatttaaatataatcctagtttttggctctttatggcctgagttggttgttctctcctggacttgcccagattgataacaccccttctgtgacrtgggctggtctgaagagccctctggagaagagagctgttctcatctagtttagtctggcctgagcagagagcactctgtcattgggaggcttggacttca

SEQ ID NO: 14438 - DNA, 201 bp, Homo sapiens
cacccacctcgacctcccaaagtgctgggattacaggtgtgagccaccacacctggcccagaagttattttttttttaaagttttttaaaaaagatccaarccaaatgttataaatgagcaagtgaaagggcaggttagagagcaggttgtacacataatcccaattttgtaaaataaatatgttccagcttgtatcatat

SEQ ID NO: 14439 - DNA, 201 bp, Homo sapiens
ttgaagattggggagcagagttcatggtacagaaagacatcttgcacttgctagtcctctgtctggaaatctcctccccagatgttttcatgccttgcttyttccagtgccacttacctgagaggacttctacaccatcctttctacaccagcacctccatcatgctctttttcttgtaatacttgaatctttttcatagc

SEQ ID NO: 14440 - DNA, 201 bp, Homo sapiens
tactgtttggggattttaatatgctctctctttctctttttctctcccaatttcttggaagttcagataaactacttagttttggtttggtgaagtggcartttagcatgagtaactccattttgttttggtttggtatggtggggcctagtgtggaagcccagtccaaaacaacgaccttccatccattttgtttaccta

SEQ ID NO: 14441 - DNA, 201 bp, Homo sapiens
cttagttttggtttggtgaagtggcagtttagcatgagtaactccattttgttttggtttggtatggtggggcctagtgtggaagcccagtccaaaacaaygaccttccatccattttgtttacctatatatatgtaattgaaacaacaaaaaccttactaagagcatgttttctgttctttattcttttctttttttctc

SEQ ID NO: 14442 - DNA, 201 bp, Homo sapiens
cgaccttccatccattttgtttacctatatatatgtaattgaaacaacaaaaaccttactaagagcatgttttctgttctttattcttttctttttttctyttttggagacagagcctcactctgtcacccaccacccaggctggagtgcagtggtatagtctctgctcactgcaacttctgcctcccgggttcaagtgat

SEQ ID NO: 14443 - DNA, 201 bp, Homo sapiens
ctcccgggttcaagtgattcttctgcctcagcctcccaagtagctgggactacaggcatgtgccatcacgcctggttagtttttgtatctttagtagagayggagtttcaccatgttggccaagctggtctcgaactcctgacctcaggtgatccaccttcctcagcctcccaaaatgctgagattacaggcgtgagccat

SEQ ID NO: 14444 - DNA, 201 bp, Homo sapiens
gtttctcctgaagtaggatttcacagcatcaaacaaacctttgcatttttccttaagaccaaagattcaatcactcttaatatctagaactattagctatyctttattcagttccagattgccttcataataatcatttgaaaattaccttggtgatctcatgttcatgtcctttgaaccttttcaccacatttccagttt

SEQ ID NO: 14445 - DNA, 201 bp, Homo sapiens
tattagctatcctttattcagttccagattgccttcataataatcatttgaaaattaccttggtgatctcatgttcatgtcctttgaaccttttcaccacmtttccagttttccaattataggccacaactgtctgaagagagtgaagattgtagtttcattactcaattcttgttaaagtgacactagcctctactgcat

SEQ ID NO: 14446 - DNA, 201 bp, Homo sapiens
agagtgaagattgtagtttcattactcaattcttgttaaagtgacactagcctctactgcattctcaccttactttctccctcctcactcactccctctcygctcaggaacttgctcaaagcattcggggttccctgttgtggccgtccctcctcacgtgcccctcctttgagtttcttttctttcctcctggttgttctc

SEQ ID NO: 14447 - DNA, 201 bp, Homo sapiens
gcatggccacacaattgctgccttggttgtgaggaaccgtgcaagtcccacatcatgaccatcctgtcacgagaggcactgaagaactggctggatttggraatacaggctacctgctcagggaaaaaacaacaacactgaaatagctctggtatgctagttggactggactttaaattgggggaaagatgagtctgcata

SEQ ID NO: 14448 - DNA, 201 bp, Homo sapiens
tatcttttgaggagaactaacagcaggctgcttacctccagtatcttggttccaaatcttcaccttgcaatcatgtgatgaggtagcaattaaaggcatcraggccaatgctcttggtagaaagacgcaggatgcgacagtctggaaatgccccttatactcacatattctgtttcgagtctgtcttaggtcccacaactg

SEQ ID NO: 14449 - DNA, 201 bp, Homo sapiens
tgcctgtaacaacaactaagtgaatggtttgctctgtttctcctgaagtaggatttcacagcatcaaacaaacctttgcatttttccttaagaccaaagaktcaatcactcttaatatctagaactattagctatcctttattcagttccagattgccttcataataatcatttgaaaattaccttggtgatctcatgttc

SEQ ID NO: 14450 - DNA, 201 bp, Homo sapiens
ttatcagctgtgttctgtttactacctgtgctattaagggcttaatgacaaaagaaaaattgtgttcgatatgcctgtaacaacaactaagtgaatggttygctctgtttctcctgaagtaggatttcacagcatcaaacaaacctttgcatttttccttaagaccaaagattcaatcactcttaatatctagaactatta

SEQ ID NO: 14451 - DNA, 201 bp, Homo sapiens
ccgcctgtgtagcacagctacaggcatgaggccagagtaagtgatctgttcatcagcaaccagatacctggacctcacacagtctcctaccgtggcttcasagccttctcctccaaagccattgctgcaggagatacacttgtgtccatccacactgacttcacagtaggtctgaatgtgctgctttgcaggaaacatatg

SEQ ID NO: 14452 - DNA, 201 bp, Homo sapiens; identical to SEQ ID NO: 8088

SEQ ID NO: 14453 - DNA, 201 bp, Homo sapiens
ggagtttcgctcttgttgcccaggctggagtgcaatggcacaatctcggctcaccgcaacctccgcctcctgggttcaagcgattctcccgcctcaggctccccaggtagctgggattacaggcatgcaccaccacgcctggctaatttttgtatttttagtagagacggggtttctccatgttggtcaggctggtctcaa

SEQ ID NO: 14454 - DNA, 201 bp, Homo sapiens
gtgtcatatgagtttttgcctttttagtggttagggaagtaaaagctcccagtcctacagcatgatggtgttccatcatggggaacccatggggagccccraacaacagtatggggttgtttgctttcatggcaactcaagagctgccttatttcaacctcttggcatctgtgggccctgtggggaccccgtagttagaag

SEQ ID NO: 14455 - DNA, 201 bp, Homo sapiens
caccacacctggctaattttttatttttagtagagacggggtttctccatgttggtcaggctggtcttgaattcctgacctcaggtgatctgcccgccttygcctcccaaaatgctgggattacaggcgtgagccaccgcacccggcccattcacattctttaataatataccttcaactatattattgaggaatgctttg

SEQ ID NO: 14456 - DNA, 201 bp, Homo sapiens
gatcctttctgcttattaatcttttcatctttgaatgaggataagtccaatttttggcagtaaatccaataaggcttgatacatgctcaagtgttacatgcacacacacacacacacacacacgtgcacacacacacaagtgcatgcacacacactcacacacagtcaattctctctcactttctttccttttagtccaag

SEQ ID NO: 14457 - DNA, 201 bp, Homo sapiens
atcctttctgcttattaatcttttcatctttgaatgaggataagtccaatttttggcagtaaatccaataaggcttgatacatgctcaagtgttacatgcacacacacacacacacacacacgtgcacacacacacaagtgcatgcacacacactcacacacagtcaattctctctcactttctttccttttagtccaagg

SEQ ID NO: 14458 - DNA, 201 bp, Homo sapiens
aactgattcccctggaggttctgactgtagatggtgaaggagaattccacataaggttagatttgttttccctatagtactgtatttttttgttgtggtgtttttttttttttaatctaccatttcaagctgggcgcagtggctcatgcctgtaatcccagcactttgggaggccaaggcgggcagatcacctgaggtcgg

SEQ ID NO: 14459 - DNA, 201 bp, Homo sapiens
catctaatccaaaaatccaaaatccaaaatgatccaaaatctaaaactttttgagcactgacatgacattcgaaggaaatattcattggagcattttggattttttttttttttttttttagacagaatcttactatattgcccagactggagtgcagtggtgcaacctgggctcactgcaacctccacctcccaggttca

SEQ ID NO: 14460 - DNA, 201 bp, Homo sapiens
gatttgaccttagcctaggagaatgaacgcaaggcaaataaatacctgttgaatgagtgaatggaatactaagatgaagagtcggcttggtggtacgctattttttttttttttttctgagatggagtttctctcttgttgcccaggctggagtgcaatggcaccatctcagctcatcacaacctccacctcccaggttca

SEQ ID NO: 14461 - DNA, 201 bp, Homo sapiens
gcattgctaccagactagagtctattcatctccgtattcctggtgcacagtatggggcttggtatatagtaggggcttgttgaatgtttgttgaatgaatsaatggcagggatcctagccaacatttatttatttttaagacggagtcttgctctgtcgtccaggctgaagtgcagtcgcgcgatctcggctcactgcaac

SEQ ID NO: 14462 - DNA, 201 bp, Homo sapiens
ttgaggccaggaatttgagaccggtctgggcaacataaaaagactcaggtctctacagaagttttttttgttttatttttatttttatttttttttgagayggagtctcgctctatcgcccaggctggagtgcagtggtgcaatctcgtctcactgcaagctctgcctcccggattgatgccattctcctgcctcagcctc

SEQ ID NO: 14463 - DNA, 201 bp, Homo sapiens
tgaggccaggaatttgagaccggtctgggcaacataaaaagactcaggtctctacagaagttttttttgttttatttttatttttatttttttttgagacrgagtctcgctctatcgcccaggctggagtgcagtggtgcaatctcgtctcactgcaagctctgcctcccggattgatgccattctcctgcctcagcctcc

SEQ ID NO: 14464 - DNA, 201 bp, Homo sapiens
ctgcaagctctgcctcccggattgatgccattctcctgcctcagcctcccgagtagctgggactacaggcatctgccaccacacccagctaatttctttcttttttttgtatttttagtagagacagagtttcactgtgttagccagggtggtctcgatctcctgaccttgcgatccacccacctcgacctcccaaagtgc

SEQ ID NO: 14465 - DNA, 201 bp, Homo sapiens; identical to SEQ ID NO: 8131

SEQ ID NO: 14466 - DNA, 201 bp, Homo sapiens
tagaagtaccccatagatataagtacatctaggtgcagacattctgatttaatgcctagatgctgaaccttgatgtgtgaagactagcgtctacaagaggraagtgccagtcagtgctgccagtcccactctcattgatacagatcagatcacagctggagaataatgttcagggaggagagcaaattgaattatgtccaa

SEQ ID NO: 14467 - DNA, 201 bp, Homo sapiens
gggggaaagatgagtctgcataactccctccccacacacacttcttttctttttttttgagacggagtctcactttgtcacccaggctggagggcagtggygtgatctcagctcactgcaacctccacctcctgggttcaagcgattctcctgcctcagcctcccgggtggctgggattacaggcaccagccaccacgccc

SEQ ID NO: 14468 - DNA, 201 bp, Homo sapiens
tcttttctttttttttgagacggagtctcactttgtcacccaggctggagggcagtggtgtgatctcagctcactgcaacctccacctcctgggttcaagygattctcctgcctcagcctcccgggtggctgggattacaggcaccagccaccacgcccagctaatttttgcatttttagtagagacagggtttcaccatg

SEQ ID NO: 14469 - DNA, 201 bp, Homo sapiens
ggtctgttttccagtccagggaagggatcccctccatggcatccctgatgaagtatctgtagccctagttgatgctcactctgtaatgatgggctgattaytttctaagctagtgacctattgttgggagatttccttctggcaggagaaagtatctacccgtatgccacttgaaactctgatcttcgctcagaaccaatg

SEQ ID NO: 14470 - DNA, 201 bp, Homo sapiens
tttagtctggcctgagcagagagcactctgtcattgggaggcttggacttcatcatagaggacccatgtgatctgaatttgtctgcatggcaggctgccaratccctcttaaaagtgacagttaaagctggctgtactgtgaaaacaccccaggaggaaaagaagccacagtgttggtagtcttattgctattcctggaaa

SEQ ID NO: 14471 - DNA, 201 bp, Homo sapiens
ctgaatttgtctgcatggcaggctgccaaatccctcttaaaagtgacagttaaagctggctgtactgtgaaaacaccccaggaggaaaagaagccacagtrttggtagtcttattgctattcctggaaaccatgcaaaccccagtcagatgacttccagccctggcaccagagatattggatcagtgtctgagaaggaagg

SEQ ID NO: 14472 - DNA, 201 bp, Homo sapiens
aagcctggcacctccctcctcacctggttccttcctctcttgccaagggatgcctgctctcctttgcctactgccacggtggaagcttcctgagccctcamcagaaacagaagcctgcgtcacacttttcatacagcctgcagaaccatgagccaaataaactgcttttctttataaactacttagcctcagttatttttt

SEQ ID NO: 14473 - DNA, 201 bp, Homo sapiens
tttggtgaagtggcagtttagcatgagtaactccattttgttttggtttggtatggtggggcctagtgtggaagcccagtccaaaacaacgaccttccatycattttgtttacctatatatatgtaattgaaacaacaaaaaccttactaagagcatgttttctgttctttattcttttctttttttctcttttggagaca

SEQ ID NO: 14474 - DNA, 201 bp, Homo sapiens
ttctcccacctcaggctcagtacccaccggtgggctgcggggctggagctggggccggcgggaacgcggagcctgggggtgggaacagcctccgagccctyccgcgcctccgcccctagcagcaggcgcacgttgctagggcgggagtgctggagaaaagcctccgggcaccctcgcaggccgccgaaccgcagttccgtt

SEQ ID NO: 14475 - DNA, 201 bp, Homo sapiens; identical to SEQ ID NO: 8134

SEQ ID NO: 14476 - DNA, 201 bp, Homo sapiens
agacggagtctcgctctatcgcccaggctggagtgcagtggtgcaatctcgtctcactgcaagctctgcctcccggattgatgccattctcctgcctcagmctcccgagtagctgggactacaggcatctgccaccacacccagctaatttctttcttttttttgtatttttagtagagacagagtttcactgtgttagcc

SEQ ID NO: 14477 - DNA, 201 bp, Homo sapiens
tcccaagtagctacaggcgcacggcaccactcccggctaattttttgtattttagtagagacagggtttcactgtgttgcccaggatggtctcgaactcckgagctcaggcaatccacccgcctcggcctcccacagtgctaggattccaggcgtgagccaccgcgcccggcctaaagcttattttttatgtgtatgtgga

SEQ ID NO: 14478 - DNA, 201 bp, Homo sapiens
gcccagggaataagagggtcttgcctagagtcacacagggagccagttctaggccaccactctcacggttgcctcaaattttggggacgacttgtgtgcastttttcctttctgtcgcttcagatggcaaatgctcctctccctgcccattatatgaacaactaaagcttaatttgtttttgtttttgttttcaagagacg

SEQ ID NO: 14479 - DNA, 201 bp, Homo sapiens
agtatagaaaatgagagacccaatggcatgggagtggatgggggtggggtggggtggggtagggagaagaatgtgggttaagaaggcaattcaggccagaytaaggagaaatatttaaaaaggagaagagaagggagacccatttacattgtcagcaatggtattatttactctgaaaatgtgcagaatgactgaaggact

SEQ ID NO: 14480 - DNA, 201 bp, Homo sapiens
ttcatttttgtatctatgatttgaccttagcctaggagaatgaacgcaaggcaaataaatacctgttgaatgagtgaatggaatactaagatgaagagtcrgcttggtggtacgctattttttttttttttttctgagatggagtttctctcttgttgcccaggctggagtgcaatggcaccatctcagctcatcacaacc

SEQ ID NO: 14481 - DNA, 201 bp, Homo sapiens
tattgggtctgttttccagtccagggaagggatcccctccatggcatccctgatgaagtatctgtagccctagttgatgctcactctgtaatgatgggctsattactttctaagctagtgacctattgttgggagatttccttctggcaggagaaagtatctacccgtatgccacttgaaactctgatcttcgctcagaac

SEQ ID NO: 14482 - DNA, 201 bp, Homo sapiens; identical to SEQ ID NO: 8231

SEQ ID NO: 14483 - DNA, 201 bp, Homo sapiens; identical to SEQ ID NO: 8232

SEQ ID NO: 14484 - DNA, 201 bp, Homo sapiens
tctcaacacttaaggaggccgaggcagatggatcacttgagcccaggagttttagaccacacaaacacacaaaaaattagccaggtgtggtggtgcatgcstgcagtcccagctactcaggaggctaaggagggaggattgattgagccctggtgattgaggctgcagttagccatgatcacaccaagagagggaagaagg

SEQ ID NO: 14485 - DNA, 201 bp, Homo sapiens
gcctgagcaccttgcccctcctcactgaagggggcttaatgtctggggcacagttgactccatccctctcttttttcctgtatgtggttttttgttttttkttttttcaagacaaggtctcattctgtcacacagactggagtgcagtggcacaatctcagctcactgcaaactctgcctcccaggttcaagtgattctcc

SEQ ID NO: 14486 - DNA, 201 bp, Homo sapiens
aagggtaccgccctcccactctgctgccactttgaatagaagtccaagctttcgctttcttgccctgactttgattcttcacattgctgaggagcagtgaytgaagcttaatctcattgtctacagtccgtctcctctatggagctgcactattctttcccatctcaattatttctgatgtaaccaaaacactctctctcc

SEQ ID NO: 14487 - DNA, 201 bp, Homo sapiens
tttcccatctcaattatttctgatgtaaccaaaacactctctctccccactgccttttttcttttgtaaagacttgcaaagggtcagttccagaggctcgrgccctgtgttctgactttcacagacagaggcctgccactcttacatttacaggtcatcattctgagcaatacactttttttgaagagtagtcctaaaagc

SEQ ID NO: 14488 - DNA, 201 bp, Homo sapiens
agggtttcaccatgttggccaggctggtctccaactcgtgacctcaggtgagccacccacctcggcctcccaaagtactgggattacaggcatgagccacygtgcccggcccccacacacacttctcaaaagagtaatacctaagcttgaaatctatgaatgcacagcatgggccagtctgaatttccacctttatcaatg

SEQ ID NO: 14489 - DNA, 201 bp, Homo sapiens
tttatcccaattacatttactgctatcatatatatgtttgatcttgttccttccatcttttctgttggtttttgaaaaacactttgtcatattttcattgkcttctttttctataaaattgtatatttgtttttagagttatttttccctttatatttttaatttaaataatatggaacttaagttcttctcatgatacct

SEQ ID NO: 14490 - DNA, 201 bp, Homo sapiens
tatatgtttgatcttgttccttccatcttttctgttggtttttgaaaaacactttgtcatattttcattgtcttctttttctataaaattgtatatttgtytttagagttatttttccctttatatttttaatttaaataatatggaacttaagttcttctcatgatacctctgtatatgtattaatatccttaaactcat

SEQ ID NO: 14491 - DNA, 201 bp, Homo sapiens
aactcatattctcaatgtattaatttcagaaagaaaacagaatctcctgtaaggaaaattttttttttctttaattagcacaattatattacttctggctygttcccacttttgtaagtactctcttggatttttatctagtctattatcatattattaatattttgtattttatacatataaatttttaaaagaattaaa

SEQ ID NO: 14492 - DNA, 201 bp, Homo sapiens
ctcgagtagctgggtttacaggcatgcgccaccacacctggctaattttttatttttagtagagacggggtttctccatgttggtcaggctggtcttgaaytcctgacctcaggtgatctgcccgccttggcctcccaaaatgctgggattacaggcgtgagccaccgcacccggcccattcacattctttaataatatac

SEQ ID NO: 14493 - DNA, 201 bp, Homo sapiens
tagagacggggtttctccatgttggtcaggctggtcttgaattcctgacctcaggtgatctgcccgccttggcctcccaaaatgctgggattacaggcgtsagccaccgcacccggcccattcacattctttaataatataccttcaactatattattgaggaatgctttgcatatggcaagattttacaaatttaagaat

SEQ ID NO: 14494 - DNA, 201 bp, Homo sapiens
gagccaccgcacccggcccattcacattctttaataatataccttcaactatattattgaggaatgctttgcatatggcaagattttacaaatttaagaaygtcttcccattgcctttacacatgaacaacactctccgcacatacagattctttttctttcttcctttcctttcctttctttctttctctttcttttctt

SEQ ID NO: 14495 - DNA, 201 bp, Homo sapiens
agcaatcctcctacctcagcttcccaaagtgttgggattttaggaatgagctaccctgcctggccaatttttactttttaataatattttttcctcaaatmttttctctcccagataattcttctattgtcttacttttttttttgagactaagatcttgctctgtcgccaaggctggatgcagtgaaatcatcacagctc

SEQ ID NO: 14496 - DNA, 201 bp, Homo sapiens
taatcaaattttatctttgcttcttgagtagttcttccttcaaagtgtattttcatctgacattagcttgttatatgtatatttaaaaaaatctaggcatrtaggcctcactttggatcctttctgcttattaatcttttcatctttgaatgaggataagtccaatttttggcagtaaatccaataaggcttgatacatgc

SEQ ID NO: 14497 - DNA, 201 bp, Homo sapiens
ttggcagtaaatccaataaggcttgatacatgctcaagtgttacatgcacacacacacacacacacacacgtgcacacacacacaagtgcatgcacacacwctcacacacagtcaattctctctcactttctttccttttagtccaaggtctactataacttgacttgtcatgctgaatattgatggttgattatgtcttg

SEQ ID NO: 14498 - DNA, 201 bp, Homo sapiens
ggcagtaaatccaataaggcttgatacatgctcaagtgttacatgcacacacacacacacacacacacgtgcacacacacacaagtgcatgcacacacacwcacacacagtcaattctctctcactttctttccttttagtccaaggtctactataacttgacttgtcatgctgaatattgatggttgattatgtcttgat

SEQ ID NO: 14499 - DNA, 201 bp, Homo sapiens
tcattaaatgtccccaactagactagaaggttgctgagcacagggattttgtcactttcctagctatggtaagcacagggtaagcccaagccttcagtacwgtacttgttgagtcaggataggtcaagagttgttatcagctgtgttctgtttactacctgtgctattaagggcttaatgacaaaagaaaaattgtgttcg

SEQ ID NO: 14500 - DNA, 201 bp, Homo sapiens
ccaggctggaggacagtggcccgatctcggcttactgcaacctccacttcccaggttctagcaattcttgagcctcagcctcccaagtagctgggattacrggcaagcgccatcatgcccagctaatttttgtatttttagtagagatggggcttcgccatgttgtccaggctggtctttagctcctgtcctcaagtgatc

SEQ ID NO: 14501 - DNA, 201 bp, Homo sapiens
acagtggcccgatctcggcttactgcaacctccacttcccaggttctagcaattcttgagcctcagcctcccaagtagctgggattacaggcaagcgccaycatgcccagctaatttttgtatttttagtagagatggggcttcgccatgttgtccaggctggtctttagctcctgtcctcaagtgatccgcctgccttgg

SEQ ID NO: 14502 - DNA, 201 bp, Homo sapiens
attgttttaaaaaagcctggcacctccctcctcacctggttccttcctctcttgccaagggatgcctgctctcctttgcctactgccacggtggaagcttmctgagccctcaccagaaacagaagcctgcgtcacacttttcatacagcctgcagaaccatgagccaaataaactgcttttctttataaactacttagcct

SEQ ID NO: 14503 - DNA, 201 bp, Homo sapiens
cacggtggaagcttcctgagccctcaccagaaacagaagcctgcgtcacacttttcatacagcctgcagaaccatgagccaaataaactgcttttctttawaaactacttagcctcagttatttttttatagcaacacaaacaaacaaagaggcagagtttccttttggagtgatgaaaatgttctagaactagatagtga

SEQ ID NO: 14504 - DNA, 201 bp, Homo sapiens
tcatgatccacccgcctcggcctcccaaagtgctgggattacaggcgtgagccaccgcgcccggccggatttttttttttttaataatttcactatggcayctctcagtgtgccagaatcatgaaatagatgttctgagatgctagaaataatgccactaaatgagacaatgtaggtaatgacctagactagcagttctta

SEQ ID NO: 14505 - DNA, 201 bp, Homo sapiens
ttaaggcaaacattagaaatttgcaaaaacataaagcaataccacttcttccaattaaatattttggttttggaaagtatatttatttttcataaaatgaygttttatgttaatatgcaataggtttattgctatttcaaaattaataagtaaatgtctttaaaatttgttttttaaaattaattaattaatttacttatt

SEQ ID NO: 14506 - DNA, 201 bp, Homo sapiens
agtttcactcttgtcacccaggctggagtgcaatggcgtgatctcagcccactgcaacctccgtctcctgggttcaagcgattctcctgtctcagcctccmgagtagctgggactacaggcatgcgccactacatcaggcttttttttttttttttttttttttgtatttttagtagagacagggtttcaccattttttgg

SEQ ID NO: 14507 - DNA, 201 bp, Homo sapiens
tcctgggttcaagcgattctcctgtctcagcctccagagtagctgggactacaggcatgcgccactacatcaggcttttttttttttttttttttttttgkatttttagtagagacagggtttcaccattttttggcaaggctagtctcaaacccctgacctcaggtgatccacccaccttgacttcccaaagtgctagga

SEQ ID NO: 14508 - DNA, 201 bp, Homo sapiens
ctgaaaaaaagagaaacctgaagatgtgaccagcatgaacatttgctgggaccgaaggaacctaacgaaggaccagtctcaactactccatgtcatgtgtyccctgcgactggctgtgatatcagatagctgagggaagtatggggggcagtgggagcacccagtccccatttcttctgaggttctgcctaaaagttctag

SEQ ID NO: 14509 - DNA, 201 bp, Homo sapiens
aaagttctaggaaataagtttcttatgggcatgaccaacctaattctaggaagaactgtctacaggaagaactgtttacagaagagaacagcagctaaaaygcaccaacttaatattctcattcataccattagcattaaaaaaatggagttttccagaagaatttcagcctacattttgagaagttgctagaattgactt

SEQ ID NO: 14510 - DNA, 201 bp, Homo sapiens
aacttaatattctcattcataccattagcattaaaaaaatggagttttccagaagaatttcagcctacattttgagaagttgctagaattgacttcctgamgagaataggtaaccaatacagaaaagcacaatgcaatggaaacaatgtgagtggcatcaagaggcctaggatctaccccagccctgcctcatcccattat

SEQ ID NO: 14511 - DNA, 201 bp, Homo sapiens
ttaaaaatagcacttaaaaggtaccaggaactgctctatgttttatatttattaactcattttatctattccacaagcctctgagatactgttactacagrttgagcatctaatccaaaaatccaaaatccaaaatgatccaaaatctaaaactttttgagcactgacatgacattcgaaggaaatattcattggagcatt

SEQ ID NO: 14512 - DNA, 201 bp, Homo sapiens
actttttgagcactgacatgacattcgaaggaaatattcattggagcattttggattttttttttttttttttttagacagaatcttactatattgcccaractggagtgcagtggtgcaacctgggctcactgcaacctccacctcccaggttcaagcaattctcctgcctcagcctcctgagtagctgcgattacaggt

SEQ ID NO: 14513 - DNA, 201 bp, Homo sapiens
ggtcccaaacatttcagataagggatactcaacctgtatggccattttgcagatgtgaaaagtgaggcacagagatatcaaatagtttgctcaagtttatrctgcaaataagtggcagagctgaaacttgaatccaggcagtccaactccagaggccctgttcttgaccagcatattatactgcatctctacaaaagctgg

SEQ ID NO: 14514 - DNA, 201 bp, Homo sapiens
ttcataatgcacaaatattaatgcacaaatatacacagagaacacatacaaacggatatatgaatctagaggatattaaagctgaagcaaattatggcctytgatcagagtgattggacccaataaagctaagaattcattatgttacatagcaaggcaattaaaaagtctcaagaacaaagtatatgaatttgggttata

SEQ ID NO: 14515 - DNA, 201 bp, Homo sapiens
catagcaaggcaattaaaaagtctcaagaacaaagtatatgaatttgggttatatctacgttgttgtaatttatcatgagtagaataagaaataaaagtaytactaagttatcttccactatttttattaggaacatgtaatatacttgagaggaggtataatttctggttcatttttgtatctatgatttgaccttagcc

SEQ ID NO: 14516 - DNA, 201 bp, Homo sapiens
caggctccagacccagaaaggctggagaggacatgggaaaatctacagattcagttatggctctggatgtccctgttggttccagttggaaccaggcctcrgtctgaatcccatcacttctttctattccaatctgctttccaaaggccttgggatatccagtagtcactctaaaccaccctaaacagaaagcagagaatt

SEQ ID NO: 14517 - DNA, 201 bp, Homo sapiens
ggatatccagtagtcactctaaaccaccctaaacagaaagcagagaattctcttttaactctccagtgcaatattccttgatatacaccagtacctatccractgttctattccatgaagaaactgggactcagagggctgtgacttgctgaaggtcacaggggcagagccgggtggactggaccttatttccctggtccc

SEQ ID NO: 14518 - DNA, 201 bp, Homo sapiens
ccctgatttcgactagaaattcctcctttggacactcccccagctccccactcctctattcctttcgttttttttttttcattgaaccattacagcctagyaccatagcaagaagagacccctcagtaccttcttgagatccaaatgggaagacagttgtagaaacacagtttttacagctgcggtcgcattgctaccaga

SEQ ID NO: 14519 - DNA, 201 bp, Homo sapiens
tacagctgcggtcgcattgctaccagactagagtctattcatctccgtattcctggtgcacagtatggggcttggtatatagtaggggcttgttgaatgtytgttgaatgaatcaatggcagggatcctagccaacatttatttatttttaagacggagtcttgctctgtcgtccaggctgaagtgcagtcgcgcgatctc

SEQ ID NO: 14520 - DNA, 201 bp, Homo sapiens
ggctattgggtctgttttccagtccagggaagggatcccctccatggcatccctgatgaagtatctgtagccctagttgatgctcactctgtaatgatggrctgattactttctaagctagtgacctattgttgggagatttccttctggcaggagaaagtatctacccgtatgccacttgaaactctgatcttcgctcag

SEQ ID NO: 14521 - DNA, 201 bp, Homo sapiens
tctccttacagacttaatccctttcccccacaacagcctggcaagctacaaccaggatagactcactgctttgtcctgggacactgggctaggctcagtgmagctacagaggtgagttactagatctctgcacccaagatgttcctgctctggggatgtttttccctctgagagagaggctttaggcttcaggcacgaaag

SEQ ID NO: 14522 - DNA, 201 bp, Homo sapiens
ttgtcctgggacactgggctaggctcagtgcagctacagaggtgagttactagatctctgcacccaagatgttcctgctctggggatgtttttccctctgrgagagaggctttaggcttcaggcacgaaagactcccaaactggtacctgtagccaggcctctccctgagtcggacctgtatatccacctgccacccgccc

SEQ ID NO: 14523 - DNA, 201 bp, Homo sapiens
gttcctgctctggggatgtttttccctctgagagagaggctttaggcttcaggcacgaaagactcccaaactggtacctgtagccaggcctctccctgagycggacctgtatatccacctgccacccgcccatctgcaactggcagtttaaaagacacctcattcttgacatgactcatactggaaacatcatcttcccct

SEQ ID NO: 14524 - DNA, 201 bp, Homo sapiens
aacaatccccgagacttctcaattctgcctcccaaacattataaaaataaaaaccttctctctacctaccagctggattcaggccaacatcagggtgtgayagattaaaaacgaccacaacttctttgtagctcttcccatcaaggctggctttgtaacttgttttgaccaatagaatgcagcaggagtgacatcgtggga

SEQ ID NO: 14525 - DNA, 201 bp, Homo sapiens
agacttctcaattctgcctcccaaacattataaaaataaaaaccttctctctacctaccagctggattcaggccaacatcagggtgtgatagattaaaaaygaccacaacttctttgtagctcttcccatcaaggctggctttgtaacttgttttgaccaatagaatgcagcaggagtgacatcgtgggacttctgagttt

SEQ ID NO: 14526 - DNA, 201 bp, Homo sapiens
tgtgatagattaaaaacgaccacaacttctttgtagctcttcccatcaaggctggctttgtaacttgttttgaccaatagaatgcagcaggagtgacatcrtgggacttctgagtttaagcttcaaaaggccttgcagtttctgctcccatcctcttggcacactgccagcatgggaagaggaccaggctagtctgtttca

SEQ ID NO: 14527 - DNA, 201 bp, Homo sapiens
ttctttgtagctcttcccatcaaggctggctttgtaacttgttttgaccaatagaatgcagcaggagtgacatcgtgggacttctgagtttaagcttcaaraggccttgcagtttctgctcccatcctcttggcacactgccagcatgggaagaggaccaggctagtctgtttcagagacatggcccatccaatagctagc

SEQ ID NO: 14528 - DNA, 201 bp, Homo sapiens
tataatcttatgggaccaccaggtacatgcagtccatcattgatcaaaatgttattatgcagcatacgactttatcctcagcttagaggccatctccctckctgcccccaagtcttccctacccattcctccccttctccagactgggttaactattcttcttctgtgcttccaaagcccccacactttacaccacatagt

SEQ ID NO: 14529 - DNA, 201 bp, Homo sapiens
gcccccacactttacaccacatagtataacttttcatttacttctctctctcactcaactgcaagcaacagaggcagtgactgagtctcatttacacttgyattgttggtgtctaacccagggtctggcacagcactgcaacagaactttcaacaattatggaaatgttctatacctgcattgtctaatacatcagccact

SEQ ID NO: 14530 - DNA, 201 bp, Homo sapiens
ttacacttgtattgttggtgtctaacccagggtctggcacagcactgcaacagaactttcaacaattatggaaatgttctatacctgcattgtctaatacrtcagccactagccctactagctattgagcacttgaaatgtagctagtgcaactgaagaactgaattttacatgttatttattttaattaatttaaattta

SEQ ID NO: 14531 - DNA, 201 bp, Homo sapiens
actgaattttacatgttatttattttaattaatttaaatttaaatagccacatgggcctagtggctatggtattgaacagtgtagggctagcacagagtasatggccattgaatatttttgaacaaagattacaagggaaagacagtcatgacagaccgttaggacatgatagaatgctatgggtataagcaacataattt

SEQ ID NO: 14532 - DNA, 201 bp, Homo sapiens
tcttagtccattttgtgctgctgtaacagaatactacagactgggtaatttattatgaacagaaatgtatttggctcatggttctggagactgggaagtcyaagatcgagaggctgcatctggtgagagccttcttgctgcattatgacatggtggaagacatcacatggtgagaatgcaggagtagtgagggaaggggac

SEQ ID NO: 14533 - DNA, 201 bp, Homo sapiens
ctcatgatctaatcacctcttaaaggtcccatctctcaacactgttacaaggggaattcagtttccagcacatgaactttgggggacatgttcaaaccacrgcagcctgtggctctgccttatttaaatataatcctagtttttggctctttatggcctgagttggttgttctctcctggacttgcccagattgataacac

SEQ ID NO: 14534 - DNA, 201 bp, Homo sapiens
tcaacactgttacaaggggaattcagtttccagcacatgaactttgggggacatgttcaaaccacggcagcctgtggctctgccttatttaaatataatcmtagtttttggctctttatggcctgagttggttgttctctcctggacttgcccagattgataacaccccttctgtgacgtgggctggtctgaagagccctc

SEQ ID NO: 14535 - DNA, 201 bp, Homo sapiens
ctttgggggacatgttcaaaccacggcagcctgtggctctgccttatttaaatataatcctagtttttggctctttatggcctgagttggttgttctctcytggacttgcccagattgataacaccccttctgtgacgtgggctggtctgaagagccctctggagaagagagctgttctcatctagtttagtctggcctga

SEQ ID NO: 14536 - DNA, 201 bp, Homo sapiens
caggctgccaaatccctcttaaaagtgacagttaaagctggctgtactgtgaaaacaccccaggaggaaaagaagccacagtgttggtagtcttattgctrttcctggaaaccatgcaaaccccagtcagatgacttccagccctggcaccagagatattggatcagtgtctgagaaggaaggaggaatggacacaggccc

SEQ ID NO: 14537 - DNA, 201 bp, Homo sapiens
ggctgggcctgacaccgaggagcaggcctgagggaaagtaaaggctagggaagaatagtcctttccaaaagactttccaaaatgttcattaaaataaaaartttaggccaggcctggtggctcacacctgtaatctcaacaatttgggaggttaaggtgggaggatcacttgaggccaggaatttgagaccggtctgggca

SEQ ID NO: 14538 - DNA, 201 bp, Homo sapiens
tgaccttgcgatccacccacctcgacctcccaaagtgctgggattacaggtgtgagccaccacacctggcccagaagttattttttttttaaagttttttwaaaaagatccaaaccaaatgttataaatgagcaagtgaaagggcaggttagagagcaggttgtacacataatcccaattttgtaaaataaatatgttcca

SEQ ID NO: 14539 - DNA, 201 bp, Homo sapiens
gtacacataatcccaattttgtaaaataaatatgttccagcttgtatcatatagtgggagctaatgaatgctttaacctatgtgtgaggacctgtaagtayatttgtagcagtttttcacacattgtaaatcgtgtgaggttctttgaagattggggagcagagttcatggtacagaaagacatcttgcacttgctagtcc

SEQ ID NO: 14540 - DNA, 201 bp, Homo sapiens
taagagcatgttttctgttctttattcttttctttttttctcttttggagacagagcctcactctgtcacccaccacccaggctggagtgcagtggtatartctctgctcactgcaacttctgcctcccgggttcaagtgattcttctgcctcagcctcccaagtagctgggactacaggcatgtgccatcacgcctggtt

SEQ ID NO: 14541 - DNA, 201 bp, Homo sapiens
tctttattcttttctttttttctcttttggagacagagcctcactctgtcacccaccacccaggctggagtgcagtggtatagtctctgctcactgcaacytctgcctcccgggttcaagtgattcttctgcctcagcctcccaagtagctgggactacaggcatgtgccatcacgcctggttagtttttgtatctttagt

SEQ ID NO: 14542 - DNA, 201 bp, Homo sapiens
tcccgggttcaagtgattcttctgcctcagcctcccaagtagctgggactacaggcatgtgccatcacgcctggttagtttttgtatctttagtagagacrgagtttcaccatgttggccaagctggtctcgaactcctgacctcaggtgatccaccttcctcagcctcccaaaatgctgagattacaggcgtgagccatt

SEQ ID NO: 14543 - DNA, 201 bp, Homo sapiens
cagatttacttgtatcatccccctcaactaacgaggctagaactgaaaagaaagagaatgaattatgcattcaaaggtgctcctccactcattcagggaayacctcctaagcaccttatttgtgtaggtcctataccagttgctggtgaaactgaaaaaaagagaaacctgaagatgtgaccagcatgaacatttgctggg

SEQ ID NO: 14544 - DNA, 201 bp, Homo sapiens
ggtcagacacaatgtcaggtatttcacatctagtatctgaattcatcctctgaagaaccttagcaggtgatagaattctccccattttataaatgaagacmcagacactctaagagcttaagtaacttccttgagataacataactggtaagtaatagatccatgattttaacctgagtataactgactccaaaggctctc

SEQ ID NO: 14545 - DNA, 201 bp, Homo sapiens; identical to SEQ ID NO: 8270

SEQ ID NO: 14546 - DNA, 201 bp, Homo sapiens
gggaaatcagtcatcattcagaattagttacaaaagatttacatacaggtcatggccagccttggctatggggtccactggggagtgttttgttttgcttyttatttcatttttacctctttaccccattcctaccattttctaaggagaatctcttctgagatccaaagtttctagttatcctctccggtctaagaacta

SEQ ID NO: 14547 - DNA, 201 bp, Homo sapiens
acatttccacaattcaggaaagtatactatagtgttaattatatatctatttttaaatatgcaaaatatatttaaatacattgttaaacattttgattttkctcataacatagtacttctattcatcaaaaatcttgagttgactgcttatttcagagtttactgcttttgtgaaaaaggcaatttctcctgttttaaata

SEQ ID NO: 14548 - DNA, 201 bp, Homo sapiens
ggatactcaacctgtatggccattttgcagatgtgaaaagtgaggcacagagatatcaaatagtttgctcaagtttatactgcaaataagtggcagagctraaacttgaatccaggcagtccaactccagaggccctgttcttgaccagcatattatactgcatctctacaaaagctggtgcatataaagcttttggttca

SEQ ID NO: 14549 - DNA, 201 bp, Homo sapiens; identical to SEQ ID NO: 8272

SEQ ID NO: 14550 - DNA, 201 bp, Homo sapiens
ggaaggccaactattcagggaaggccatcaacattcgccctgggccttctctttcttcagtggagagttttaatggggcatgataaaacctgggctcccargggaggattgcagtacccgtatttataagtgctgtgtttgagtttgctttgctgtttccccatcacgacacaaaacctaaacgaaaccttctgtggagga

SEQ ID NO: 14551 - DNA, 201 bp, Homo sapiens
tttggccttaatctttgaatttcaatgttttcttatctgtagagctggtgtgctaactcctgtaattctgggcaatgcccatgtggttcttggctgcttcwagccatctcaggtctgattttcacacaagctcagcagcactgggctagaagggtaccgccctcccactctgctgccactttgaatagaagtccaagcttt

SEQ ID NO: 14552 - DNA, 201 bp, Homo sapiens
acatggtaccaggggatacaggggatagcatcttgacatcacctcttaagcatgagactggacagtggcagaagatgggtggctttgtaatgctgagcaaygggaagaaggagttttaaagaaggttttaggacttcatgtatcttttgaggagaactaacagcaggctgcttacctccagtatcttggttccaaatcttc

SEQ ID NO: 14553 - DNA, 201 bp, Homo sapiens
acaaaagatttacatacaggtcatggccagccttggctatggggtccactggggagtgttttgttttgcttcttatttcatttttacctctttaccccatkcctaccattttctaaggagaatctcttctgagatccaaagtttctagttatcctctccggtctaagaactattggctttactgactcccctgatgctgat

SEQ ID NO: 14554 - DNA, 201 bp, Homo sapiens
taacctgagtataactgactccaaaggctctccaatttataccagtctgctactagaaaacaactggtccttcaaaagcaatgcaaattctacataaagcraaaggtaatgcttatttctccacatgatgttacacatatgaacatacaataagcataagctgtgaggtcctggaagacaggaactatgttcttggtcact

SEQ ID NO: 14555 - DNA, 201 bp, Homo sapiens
atctggcaagcaaatatcatattctgtgctatgggattgtggctgatgcctagtttcattataaatgaagtgtgtatcttaatttttggttcatttaggcrgacttcagagcggggaattatataaattggcattctctatcatttttgctggaagctcactctggtctgtaatgctatctaacaaataaatttttatttc

SEQ ID NO: 14556 - DNA, 201 bp, Homo sapiens
agagtatagaaaatgagagacccaatggcatgggagtggatgggggtggggtggggtggggtagggagaagaatgtgggttaagaaggcaattcaggccaractaaggagaaatatttaaaaaggagaagagaagggagacccatttacattgtcagcaatggtattatttactctgaaaatgtgcagaatgactgaagga

SEQ ID NO: 14557 - DNA, 201 bp, Homo sapiens
gctgagggaagtatggggggcagtgggagcacccagtccccatttcttctgaggttctgcctaaaagttctaggaaataagtttcttatgggcatgaccawcctaattctaggaagaactgtctacaggaagaactgtttacagaagagaacagcagctaaaacgcaccaacttaatattctcattcataccattagcatt

SEQ ID NO: 14558 - DNA, 201 bp, Homo sapiens
ttcaagccatctcaggtctgattttcacacaagctcagcagcactgggctagaagggtaccgccctcccactctgctgccactttgaatagaagtccaagmtttcgctttcttgccctgactttgattcttcacattgctgaggagcagtgattgaagcttaatctcattgtctacagtccgtctcctctatggagctgca

SEQ ID NO: 14559 - DNA, 201 bp, Homo sapiens
gagtagctgggactacaggcacgcacgtacaggctggtcttgaactcctgacctaaagtgatctgcctgcctcgtttttcctgtatgttctaatgttattycagggatcccctttgcctcactctggccattccaaaacatatatatgtttcatttatataaatccaaatgaaaatattaaaattgcaagtgagatatttt

SEQ ID NO: 14560 - DNA, 201 bp, Homo sapiens
cacttctaaaacactcaaaattactcaacaaataaaatatccccttttcttggaaagggttcagcattatccagacatcggctctctctcagctcacttaygtatttaacattatcccaacaaaaacatcaacaagcttttgttagaaaagtcagcaaaaattcatggggaaaaataaaaatgcacagggaaaagccttaa

SEQ ID NO: 14561 - DNA, 201 bp, Homo sapiens
ctgtcacttacttgctgtatgaccttgggtaattgacttcacttctctgtgcctgttacctcctctggaaaatagagatcatatcagtacctggttgacawatgagttaatacattccccagtgtatcaccaacacttaaaacagggtctggcacatagtaggtgctcaataaatatttactgaatgaacaagtataaagc

SEQ ID NO: 14562 - DNA, 201 bp, Homo sapiens
ccctgaggcccgcccgcgacagcagggggcggcccggggggggcggggcctctgggagcgcaccaatcaccgaaaggccgccgccacggcccgcccccagsaactcggacatagggagcgcaaaccctgctgcaggatgaaaatctcagacctgggaggctgtgtgtgcctactgcaatcagccccaccgcagacccggag

SEQ ID NO: 14563 - DNA, 201 bp, Homo sapiens
tgacttaatgcattgaggctaggaatggaagctgtgttttccctaaagatcttcaattctttacttccctaaaacagacataggttaaattaatgcccaayaaacatatttaacagtgtgtctgaggaagattttttaaaaaatagccaattaggctacctttggccatctgtcttaaagctctaatcttagcagttaatg

SEQ ID NO: 14564 - DNA, 201 bp, Homo sapiens
aagaggcgacacctgaatgaagaacctgtaaggaaaacggactttctcctctagacaatggggaagagtggaaaggttttcaacactgctgacttaatgcrttgaggctaggaatggaagctgtgttttccctaaagatcttcaattctttacttccctaaaacagacataggttaaattaatgcccaataaacatattta

SEQ ID NO: 14565 - DNA, 201 bp, Homo sapiens
tgcagagccagctgacatctatccagggtagggcaagatggaggattacctggaggatttggtttgtggtggacccagaaggatagatcattcatttattyatttatttatttatttatttatttatttggtcgcttttcattcaacgtttttgaagcatctgctctgtgctgggtcatgtgctgggtgctggagacccag

SEQ ID NO: 14566 - DNA, 201 bp, Homo sapiens
atgtattttgaagatcttttcttaccagttcaatgacataaagctcatctcttccaatactccatcccattccctggaagggactcaccactaccgaattytcattctcctatcaatggacatttagggtgtttctcattttttgctagcaccatcacctgcgatgaacatccttgtatgtgccatcttggggcattcatg

SEQ ID NO: 14567 - DNA, 201 bp, Homo sapiens
cccaggaggcagaggttgcagtgagccgagatggtgccgctgcactccagcctgggcaacagagccagactctgttcaaaaaaaaaaaaaaaagtgggcaygagtttaagcagaaaaaggattttctgtgtgtggtttcaaaatatctctatcagtgtacttcataattataaagggaaaatagtaagtttacagtggcgg

SEQ ID NO: 14568 - DNA, 201 bp, Homo sapiens
accatgcccggggctcccccagccgggcgcccgttcctctagggctgggggaccccaaagtcagaagttggggcggagggcgctctagtcccagagcactycggggagtggcagccggtgaagcggcgcgggcgtccgacaaggggtgcggggcatgtccggggcagccccgggatgcagccgcccggggagcctccgcgc

SEQ ID NO: 14569 - DNA, 201 bp, Homo sapiens
cggagactgctgctggagtccggggggcgcggggtcagcagctacattctggagggcacggagacgacgggtggctggagtttgggggcgccgcaaagctkacctgactgccccgtcacaccatgcccggggctcccccagccgggcgcccgttcctctagggctgggggaccccaaagtcagaagttggggcggagggcg

SEQ ID NO: 14570 - DNA, 201 bp, Homo sapiens
ttttatgagcaaataaagcctttgattgcctgcaactgagaggcaaactaaagtgagtggaaacttctatggaatattttttctctgccttgtttccgaayggaaatcactttattgttgctgtttttaagattataaaaggaatatttgctccattcagacgccgcctaaggacataaacaaagtgaaaatcatccctca

SEQ ID NO: 14571 - DNA, 201 bp, Homo sapiens
aagatagaaaggactttactgaaggtgggcattttatgagcaaataaagcctttgattgcctgcaactgagaggcaaactaaagtgagtggaaacttctayggaatattttttctctgccttgtttccgaatggaaatcactttattgttgctgtttttaagattataaaaggaatatttgctccattcagacgccgccta

SEQ ID NO: 14572 - DNA, 201 bp, Homo sapiens
ggggattgaagatagaaaggactttactgaaggtgggcattttatgagcaaataaagcctttgattgcctgcaactgagaggcaaactaaagtgagtggamacttctatggaatattttttctctgccttgtttccgaatggaaatcactttattgttgctgtttttaagattataaaaggaatatttgctccattcagac

SEQ ID NO: 14573 - DNA, 201 bp, Homo sapiens
cctagagctgggtagacagagatggcacatatagatcacctgctgcttggtacatacttagcacaggggtgctgtccagagactcagtccagagaaggcargtggggagaacagaccctggcagaagccagtacgtggagggagcagccccagcttggctggcttcaccaatgaagtcgatatggtcaggctcctggcaaa

SEQ ID NO: 14574 - DNA, 201 bp, Homo sapiens
agtaggcatcagttggccaggcgcgggggctcacgcctgtaatcccaacagtttgggaggccgaggcgggtggatcacttgaggttaggagtttgaaaccmgcctggccaatgtggtgaaaccccatctctactaaaaatacagaaattagccaggcatggtggcaggcaccagtaatcccagctactcgggaggctgagg

SEQ ID NO: 14575 - DNA, 201 bp, Homo sapiens
tttcctttcccattaataaacatagaaggaacatgggaatagaaaatcacccttagaacattacattttggtaatcatttctgtgggcaagaatcacaagyagatgctaaaaagtaggcatcagttggccaggcgcgggggctcacgcctgtaatcccaacagtttgggaggccgaggcgggtggatcacttgaggttagg

SEQ ID NO: 14576 - DNA, 201 bp, Homo sapiens
aaataagcatatcaaatgtgcacagaagccaacctaaaagcacttcctataggcaaaggagaataaaataagcatccatgaggccataatagtgtcattaygtaattaactgaataaatagataaatgagtgagaagggacaattcttccttaaggaagaatgggaattttcctttcccattaataaacatagaaggaaca

SEQ ID NO: 14577 - DNA, 201 bp, Homo sapiens
tctgtgttcattgattgcaagactcaatagtatgaagatgttaaatcttctaatttgatctagattcaacacaattccaattccaatcccaggaagctatwttttttttttaggtatttacaagctgattctaattttttttatggaaatacagagaaaccagaggagccaaaacaattctgaaataagaacaaattggag

SEQ ID NO: 14578 - DNA, 201 bp, Homo sapiens
tagtttctgcaggctgacaattacagaacaaaaaaaaacctaaataaatggagagatctgtgttcattgattgcaagactcaatagtatgaagatgttaamtcttctaatttgatctagattcaacacaattccaattccaatcccaggaagctatattttttttttaggtatttacaagctgattctaattttttttatg

SEQ ID NO: 14579 - DNA, 201 bp, Homo sapiens
ctaaaaatgacagatgcatgtcaaatggacacagaagccaggctgaaggctctgccatatccaaatctgggacactctgagtatcaaagtaaataatgccratcataaataacaaagtaagaaggcatgaatccatatttgtactaaataaataaatcacaggataaagctcctctctacagtaaaatagcaagtgagttt

SEQ ID NO: 14580 - DNA, 201 bp, Homo sapiens
ttttagtagagatggggtttcacctgttagccaggatggtcgctatctcctgacctcatgatccgcccgccttggcctcccaaagtgctgggattacaggyatgagccaccgcgcctggctaacggaatcccactttcaaaaatttaccctgaagatatatttcccaaagtgataaaatacatatgcacacagttactcac

SEQ ID NO: 14581 - DNA, 201 bp, Homo sapiens
agaggggtgatactcttctgtattacactataatgtttgatacatgacattatgtattgatcaaaatccaatgaactgtgaacccttatataaagtatggrctaataaaaatattatccatatttgctcatcaactgtaacaaatgtaccccttgtacactaatacgaaatgttaataataggggaaaatgtgttggggac

SEQ ID NO: 14582 - DNA, 201 bp, Homo sapiens
atctattccaactccaggaccatctctgctgcagctcagagatgcacattacaccagccttctttgtccctttatatgttttctccttaatatcaccaacrtcctataaagtaagtatcatagctctccatttcactagagaggaaactgaggctcagaaaggttaagcacatagtttgtggtcacagtgctagtgaaaag

SEQ ID NO: 14583 - DNA, 201 bp, Homo sapiens
agcaaaatgcagcttctccctcctagcccttctcctcccctcagcccaattccgggtttctaggcctccttcccctcattacaatgggagggctgttacayaaaggtgctatttccagctctttgttcgttgggcttctgtacttctgtcaagccaacagggtcccccaactcccatcccaaaatgcaccagaggcctaag

SEQ ID NO: 14584 - DNA, 201 bp, Homo sapiens
agattcccaagaccaatctcagcctcagcccctagtgtcagtgcaaaggcagagctgaaactgggcctccagattcctaatccagtgctcctccaggacgyccaaatccctccagttatagggagctcactacctccctttgtggtcacttgccaagctgagccctggtcccgggacctcccattctgtgcctggggcccg

SEQ ID NO: 14585 - DNA, 201 bp, Homo sapiens
gatgaaaatctcagacctgggaggctgtgtgtgcctactgcaatcagccccaccgcagacccggagatcgaggcccggtctgcggagggtaaggcatttaygcaagatcgcacagagtggctcacgcctgtaatcccagcactttgggaggccgggcagatcacctgaggtcaggagttcgagactagcctggccaacatg

SEQ ID NO: 14586 - DNA, 201 bp, Homo sapiens
cctgcgctggcggggagtgggggtttacagaacagtccaaccccctgagaagcatttctctgcagaagcagagcatgtgtcccttttcccccaaactcttyacttcttgtacgcaaaggaggtcgggggaggggggaagggggaaaaatgcctgcaaaggatccatgaatccaccctggacccaacactatccatcatact

SEQ ID NO: 14587 - DNA, 201 bp, Homo sapiens
tccaaaggggttgatgggctgggaagcaaatgagggaagccaacatcaggtgcacagccagggagacggctcaagactcacctggacacaggccactgaayggcactcaggaggaagtagtcgtgggcctctgctgcctaggagtttcccagcagccagcaggccctcagctggagttcaaaacacctgcgctggcgggga

SEQ ID NO: 14588 - DNA, 201 bp, Homo sapiens
taatttacctactttttttttttaacctttctcccccagcttcccagactgcaagccccaggaggcagggccacatctctcctgttcacctgttgtccccragagcccatgcctagcatgcagtagacattcaacaactattaggtttttacagaggaagaaactgaggctcagagaggcaaggcacacagctggtaagtg

SEQ ID NO: 14589 - DNA, 201 bp, Homo sapiens
catgtgggaggcgaatgtttagaaggccgcatagtagaagataatcctgcaagtggccggggagtgtgtgctttccttccagtttctgttccacactttcygggcctccattttgcaccagctctcgctgtttattggggaagggaaacccacgaagaggttaaagcaatgtgacaagtgatttagcagaggtatgaggag

SEQ ID NO: 14590 - DNA, 201 bp, Homo sapiens
ggagtcagaccccatcacgcctggaagaggggaggccgagcagctgagtggtgccaggcccagctggaattctgtccccactctaactgctcttggccacrctgctctgaataatgcaacacctgagtggaaaacttctcccctgcatctcggcagctgataagcgttgggatcttggcgggtgtctctggggacagcatc

SEQ ID NO: 14591 - DNA, 201 bp, Homo sapiens
gcctctctaagcctcctatgttctccttctaatacagaaatgatggtgcctaaccactggggtgattgtaaaaactcacagatctgatgtatagaatggakcagtccagggaatagacttgtgctagactgcctggctccagggtgtgggttcttaacctagggtttcaaactcaggggcccggctgttatacacatagtg

SEQ ID NO: 14592 - DNA, 201 bp, Homo sapiens
aagagcggttggagggatgagtgtgatcctgctgtcaccttgattttggacttctggcccccataactgaatacatttctgttgttttaagccacccagtrtgtggtcatttggtatagcagccctaggacactcacatagaaagaagggcctagtcccctctcccccttgaaactgcctggacttgtgacagctttaaac

SEQ ID NO: 14593 - DNA, 201 bp, Homo sapiens
gaaactccggacagactggcagcgtccagcctcccaatcagcagtgtgcacggcacctccaaaaccacccgaggtgggctcctgagttgttgccaacccckcaggaccaggcaggtaacacaaggagtggagggaagaaatggtgattgacaggcaacctcagggtcaggccaaccctcaggagcttaggggccggtgaac

SEQ ID NO: 14594 - DNA, 201 bp, Homo sapiens
gccagccagggccttaccacggacacatctgggagggcgttgatattgccctggacagcctcgccagtttcctccaggtccagagtgttctagaaatggaygagaaagcaaagtgagcaaacagaagctgagaagggaacactggtttgttctccagcacaccaaaattgaggaagtcttaggacacctccatgtggttca

SEQ ID NO: 14595 - DNA, 201 bp, Homo sapiens
gggacctcccattctgtgcctggggcccgtgttcctctcagccctctgcatcctcctcctcctggctcaccggtttgttggccccatctgtgggcctctckttccgaggcagctccttgctactcctgctcttggtggacaccgactgccttcctcggcctggggcgctggcctctgcctcgccagcatccacaccactgt

SEQ ID NO: 14596 - DNA, 201 bp, Homo sapiens
gcgcgttcatctccacgccgaggcccggccgggctctgagcgcgcggggtgtgggcggtgccgctgtcctcgcgggtactggcgcgacagctggatccccrggagcgcggagacgacggctggagcctgggtttggggagcacgggtacagtggctggatcctagggggtcgcggagaccgctgctagagtcccggaggcg

SEQ ID NO: 14597 - DNA, 201 bp, Homo sapiens
tctgtactaggtagacactagggaataacaatggtgacaaaacagataagagctcctgccctcccaaacctcacttcttgcagtaaaagccctggcacagyggctagaatgtcgcactcaataaatattacctatgatattagctaataataccaatggtattattgttgtcattattccttcctttctttgagcctcagt

SEQ ID NO: 14598 - DNA, 201 bp, Homo sapiens
ccattcccagtctctctggaaacccctatcctagcgcctctggcagagtctgcaggacggtgggagctgatgaaatccccttgcaacaaacagccccaatsacatgttttaaatgcaaaccggctggactttaggaggcaaaggccccacgtggacatcgcctccctcctgcagaagaactgtgagacgactgccccagga

SEQ ID NO: 14599 - DNA, 201 bp, Homo sapiens
gaagggcccaaggtgtttttccacacaggtcatggaagtgaagtgtttttctgggtttgagcagcatggcggtcctgactcttgaacagaatggggaaacygaggcttggtgcattgtgtaacctgcccagcattctccagcaagggagaagcagaccctgagactccattccccccaacccccactttggcatcatgagt

SEQ ID NO: 14600 - DNA, 201 bp, Homo sapiens
tacattcctcagctcgtggtcccttccttcatcgtcacagcacatcactgcagcaacctgtttccatcatcacacaccttgtcttcttctgttaacatctktctctgcttcccatttataagagcctggtgattatactgggtccaccccatgtcaagactttaatcatgtccgcaaaatcccatttgccatataaagtaa

SEQ ID NO: 14601 - DNA, 201 bp, Homo sapiens
cccattttatagatggggaactagaggctcagagaggtaaaattacttgcccatgaccacacaagctttggagttgaatgccaggagatctgaggcctaaygaagccctcctgctgctaggtgggagggtcattccctgcagagggtcaacagcaccctgtcaggggatggcaggggtgccttctgaaacaccagctgcct

SEQ ID NO: 14602 - DNA, 201 bp, Homo sapiens
gactttgcctgaaatctcaccttcgcttggcttcctccccttccctgtcctgcttccccacttccttgctggtctgccctgagggcacttcttgacgattrattgggtacaaatccttatctccaaggcagcttctggaaaggaatgggctgcatctgagatttaaaacattcatgcacattgtgcattctgcctcataat

SEQ ID NO: 14603 - DNA, 201 bp, Homo sapiens
tgtatcccaattggagccatgcgggcagtcggggtggtggtctgtggtgctctgactgcccccacctgtcctgcccacccctccccacatggaaaccccasccacccaggtaaaccacacagcacgctgacgtctaaccttgttcagatttctttattgaaaaattaaagtcataagctctgtatataaatacaatgacac

SEQ ID NO: 14604 - DNA, 201 bp, Homo sapiens
gccctctgcatcctcctcctcctggctcaccggtttgttggccccatctgtgggcctctcgttccgaggcagctccttgctactcctgctcttggtggacrccgactgccttcctcggcctggggcgctggcctctgcctcgccagcatccacaccactgtcctcgcttagagtctgcccgctgtccgagagctgggagag

SEQ ID NO: 14605 - DNA, 201 bp, Homo sapiens
gaggcagctccttgctactcctgctcttggtggacaccgactgccttcctcggcctggggcgctggcctctgcctcgccagcatccacaccactgtcctcrcttagagtctgcccgctgtccgagagctgggagagcgtagaggctgctggagaggggaaaaggaagagagaagcagcttatatagctggggtcagggagg

SEQ ID NO: 14606 - DNA, 201 bp, Homo sapiens
gtgccagctctagagacagcagtgatccatctgtgacagccctgggtcttctcaccacgtctgcctgctctccctcagctgcctcccctcactaggctgcsagcgccagagccctgcattttgcatcttggtctgtgcaggcgctcagggaatgtcctacggggcctatgtatcactgtagccgcaagatggcagcagaat

SEQ ID NO: 14607 - DNA, 201 bp, Homo sapiens
tggcctccccaagattcttcctgcaccctgaccctagacctgccaggggtccagagactgccacttcagtttccagcatctactccaggccaggccatggsggacaggaagggaagccacccctgccctccacgagttcagtcctcctggtgaacacagggtggccagggtagggggagctggagaaggcaccccgacgct

SEQ ID NO: 14608 - DNA, 201 bp, Homo sapiens
ctccgtggctgtcatggagaggagagagccaccaggacctgagcacaccagggagagcagaaccaaagggccagccagggccttaccacggacacatctgsgagggcgttgatattgccctggacagcctcgccagtttcctccaggtccagagtgttctagaaatggacgagaaagcaaagtgagcaaacagaagctgag

SEQ ID NO: 14609 - DNA, 201 bp, Homo sapiens
acgtctatttctttcttcccttcccaattcacaagaagaaacccaatgcctccttaagtgacactgggctgccaaaaggccatttgtgggccgtctatggrgggcccatcggagctcctctctgagctgggctctcttgagggctaagggagccagttctctcggccctagagcccagaatggaaaagagcttccaccact

SEQ ID NO: 14610 - DNA, 201 bp, Homo sapiens
ggtggactgggcaaaactcaccctccccaatgtgggtgggcctcatccaatccactaagggcctgaacagaacagaaaggcagaggaagggcaaatttgcrcgctcttctagagctgagacatccatctcctcctccctcagacaccggagctcatggttattgggcctttggacttggactaaaacaaaaccaccagctt

SEQ ID NO: 14611 - DNA, 201 bp, Homo sapiens
tggactgggcaaaactcaccctccccaatgtgggtgggcctcatccaatccactaagggcctgaacagaacagaaaggcagaggaagggcaaatttgcgcrctcttctagagctgagacatccatctcctcctccctcagacaccggagctcatggttattgggcctttggacttggactaaaacaaaaccaccagcttcc

SEQ ID NO: 14612 - DNA, 201 bp, Homo sapiens
tcaggacccccaagggcctcttcatctcagttggaggaagttccaaaccctactcattgtgcctacatgaccgggccctttcctgctactccaacatcacragctcattactgccccagggcctttgcacctgccgctctcactctgcaccacactgtggttcattccttcactttgtttagttcagacctcagcgaggcc

SEQ ID NO: 14613 - DNA, 201 bp, Homo sapiens
ccagagcctcagtgagggcatagacctggcggctccattaatcctgccagatgggacccttcacccactctacagctgaggtgactgaagatcagagcggraaggtcatctgtccaaggtcacacagcaaggacagggcagaaagctgaactctattcaaggcccgactccatatccccgacaaaaacctgcttcccataa

SEQ ID NO: 14614 - DNA, 201 bp, Homo sapiens
gctctgcagtgcctgaaatgctttggctatgtatcctcacccaaatctcatgttgaattgtaatccccagtgttgggggaggaatctggtgggaggtgatyggatcatgcgagcagatttcccttttgctgttctcgtgatagtgagtaagttctcatgtgatctggttgcttaaaagtgtacaggacttcccccttctct

SEQ ID NO: 14615 - DNA, 201 bp, Homo sapiens
ttttggccatgttatgttttgggttgttgtccacattttagggttattactcagcattactgcagcaaaagcttactaatatgtggtgttgtagaccacayagcggcacttagtggtgaataaaggtgattatttcaagctctttctctctctggaggaatgctgcagtccttgttcaaatatacacagaagaggtgggaa

SEQ ID NO: 14616 - DNA, 201 bp, Homo sapiens
tggccatgttatgttttgggttgttgtccacattttagggttattactcagcattactgcagcaaaagcttactaatatgtggtgttgtagaccacacagyggcacttagtggtgaataaaggtgattatttcaagctctttctctctctggaggaatgctgcagtccttgttcaaatatacacagaagaggtgggaatat

SEQ ID NO: 14617 - DNA, 201 bp, Homo sapiens
agccaacatgggtgtgcatggctaagggactcccacagtccccaccggcaggaagggtggtacctccatcaggtctataaaccacagcagtcgctcctgargaagggtgagcaaaaggcagtcgctcctgaggaagggtgagcaaaagggcctccaatctgagacctgctgtgtgtgggggtggggagaagaggggttccc

SEQ ID NO: 14618 - DNA, 201 bp, Homo sapiens
tgcctgctttatttttctccctagcacttgtcatcatttagcttactgtgtatttcagttatctatatcctgtgttattgcctggcattcctgctgtctgytcaactccatcgtggaaaggatttctttggtgttcaccactgtatccccagaacctcaaaatgtacatagcacacagtaaatgctcaatatttgttaaca

SEQ ID NO: 14619 - DNA, 201 bp, Homo sapiens
gtgtatttcagttatctatatcctgtgttattgcctggcattcctgctgtctgttcaactccatcgtggaaaggatttctttggtgttcaccactgtatcyccagaacctcaaaatgtacatagcacacagtaaatgctcaatatttgttaacagaaaggaaggacaagaagaaggaagggaggagagaggcagatagatg

SEQ ID NO: 14620 - DNA, 201 bp, Homo sapiens
gttcaccactgtatccccagaacctcaaaatgtacatagcacacagtaaatgctcaatatttgttaacagaaaggaaggacaagaagaaggaagggaggaragaggcagatagatgacgaaatgatgcttaacagggagctggtgagatccttcagggaagaatcacagccagatggcaggggtaacaacagagctcagag

SEQ ID NO: 14621 - DNA, 201 bp, Homo sapiens
gatagatgacgaaatgatgcttaacagggagctggtgagatccttcagggaagaatcacagccagatggcaggggtaacaacagagctcagagtcaagcargcctgggtttgaatcctggctccatcactcactagccatgcaaccttgggcaagttgcttctcctctctgagctttggttttcttctttgtaaaatgggg

SEQ ID NO: 14622 - DNA, 201 bp, Homo sapiens
ttggttttcttctttgtaaaatggggatcacagcagtactcacaactcctagctcctgggatggtcaaagaagatacgaatggaaagcactaccacagtgycatagagaacattcaacaaatctcagccactattgttattaataaaggcccaaattatgggctagggtctgtgctgagcactagggatagggactcaatg

SEQ ID NO: 14623 - DNA, 201 bp, Homo sapiens
attcaacaaatctcagccactattgttattaataaaggcccaaattatgggctagggtctgtgctgagcactagggatagggactcaatggtaaccgcacrtgcgatcgctgccctcaagcagtcagcagtcacattgggtaactgggaaacctgtacaggcttttataataggacataatgaggcaagagctgtgaccaa

SEQ ID NO: 14624 - DNA, 201 bp, Homo sapiens
atgcaaaggccaaggggtctctcaacatcacgggacagaaattaccatcctcattttacagatcctaaaactgagctcagagaggtgaaaccacttcctgmggtctcacagcaagaaagtggcagagctgggatttgaatggacgggattctcactgcagagctcaggaaacctgatgacctggaaagacagtcagcacca

SEQ ID NO: 14625 - DNA, 201 bp, Homo sapiens
gccctcagggtgtggccagcatttctgggatgctggtactagcaggttactcaccctgggcccacaggcatcctctcatttaatcctcccaacaagctggrggaagtagtatcactgtccctctgcaaaagaggaaatcaaggcaccgcgagctcaagtgccccttccacgctgcctttcctgcttgcacaattttctctt

SEQ ID NO: 14626 - DNA, 201 bp, Homo sapiens
agcatttctgggatgctggtactagcaggttactcaccctgggcccacaggcatcctctcatttaatcctcccaacaagctggaggaagtagtatcactgyccctctgcaaaagaggaaatcaaggcaccgcgagctcaagtgccccttccacgctgcctttcctgcttgcacaattttctcttagaatcacttccagggg

SEQ ID NO: 14627 - DNA, 201 bp, Homo sapiens
ctccccagtgctctcaagagaaaggccaaacaccgtcacctggacaccaggcccagcatcatctcactcctgcttccctgtcatctcctcagcaagcacaygtagctgtgactccctggacacactgcaacatttcatgccacaaagcctctggctgtctgaaccttccacccagaataccctttccaatactcatctcca

SEQ ID NO: 14628 - DNA, 201 bp, Homo sapiens
ccaggtgattctgtgcactcagcgttggaagccactgcgacagggacccaatcacagggcgctttaaatgtctgtttcccccaggagtctgtgagcatccygggggcaggaggctgcctcagtcccaggtctctgcccagtgttcagttcaggcctgaccccttgtaggttctcagcaaaggagcgggggcagggcaggat

SEQ ID NO: 14629 - DNA, 201 bp, Homo sapiens
tctctgcccagtgttcagttcaggcctgaccccttgtaggttctcagcaaaggagcgggggcagggcaggatgcagagccctggaaatgctgaagccagtwgggaggcagggcacgggtcaccttggcgtgggtgttgagcagcttgaacagggccatgacgagggcctccacagagacgctgccgccacggtactcatcc

SEQ ID NO: 14630 - DNA, 201 bp, Homo sapiens
accttggcgtgggtgttgagcagcttgaacagggccatgacgagggcctccacagagacgctgccgccacggtactcatccaggtagtaggccatggtggygtgttcctgctcgttcagcaggtgccgagcctgctcctccagcagcactcgtgtctggttccccaggctgctcagggtcacctgggagccggctgggccc

SEQ ID NO: 14631 - DNA, 201 bp, Homo sapiens
gacttaagcagcctgacagcctcgtcgtgtaggatgttgagaaagctccgcccattcacttctagaatctggtccccaacctgccaagatcaccacacaayacagtcacctgggctgtttgcaggattcacactagggacttcacagcccagatcccaattctcctctgggccagcctgtcaaggaggtcatccaggatca

SEQ ID NO: 14632 - DNA, 201 bp, Homo sapiens
tttgaggggtgggtctacgatgacattccaagggtccccttatctagaaacaacagtcatctcagggccaaggtgggcgtgaagctggggtaggatgaggmaagccatgaaggtggacatccgtaattttcctcctacacttgtactttgttgaggtttttacctcaaccatgcattcttatattaccttaaaatgtaaac

SEQ ID NO: 14633 - DNA, 201 bp, Homo sapiens
aggtttttacctcaaccatgcattcttatattaccttaaaatgtaaacaaaactttaatctactaaaagaaacagcaataaatgagaaaattagttttccrttaaagcagtacatatggcttagattcttacaaggaggcagctttattttgtaattaaaaaaatatttctggcaggtacagtggctcatgcctgtaatcc

SEQ ID NO: 14634 - DNA, 201 bp, Homo sapiens
cagacccaggagtctctgactaattctacactctgtcacttacttgctgtatgaccttgggtaattgacttcacttctctgtgcctgttacctcctctggraaatagagatcatatcagtacctggttgacaaatgagttaatacattccccagtgtatcaccaacacttaaaacagggtctggcacatagtaggtgctca

SEQ ID NO: 14635 - DNA, 201 bp, Homo sapiens
aacccactggatctatcatcaagcccaatgcattttactttcccttccaaaaggaccctccatcttcactaactccactcggatcccagctgtccttgtcyctcacctggaccattaccacagcctcctaaggggcctccctgcttctactttcaccaccttgcccgatactttccttatgtagaagacagattcatttaa

SEQ ID NO: 14636 - DNA, 201 bp, Homo sapiens
ctaactccactcggatcccagctgtccttgtccctcacctggaccattaccacagcctcctaaggggcctccctgcttctactttcaccaccttgcccgayactttccttatgtagaagacagattcatttaaactgcaaacctgatctcgtcacaccctcctttaaaatgccccagtagcttccaagctcctctgcctag

SEQ ID NO: 14637 - DNA, 201 bp, Homo sapiens
tcatctataccctgggcataaggaaacatgtaacctgactcaaattcaataaaagaaaggattaataattaaattagatttaaaatgtataaaacttttgyattaaaaaaactctataagcaaagtcaaaagaaaatgacaaccagcatgttatgggctgaatgtttgtgtccccccccaaattcctaccctaaccctgaa

SEQ ID NO: 14638 - DNA, 201 bp, Homo sapiens
aaacagagtcctattgtttaagccaccttgtctttggtattttagtcagcctaagctgactaagacacatggagagaacacttgcaatatataccacagayaaagggccagttagctctaatatttaaggaattcttaagttttagaggaaaaaagatccaaaatcctgagagcaaaaggataataaaagacatgaacaag

SEQ ID NO: 14639 - DNA, 201 bp, Homo sapiens
cgattctcctgcctcagcctcccagccagctgggattacaggcatgcgccaacatgcctagctaatttttgtatttttagtagagacagggttttaccatrttggccaggctggtcttgaattcctgacctcaagtgatccgcccaccttggtctcccaaagtgctgggattacagccgtgagccactgcacccagccaca

SEQ ID NO: 14640 - DNA, 201 bp, Homo sapiens
ccatattggccaggctggtcttgaattcctgacctcaagtgatccgcccaccttggtctcccaaagtgctgggattacagccgtgagccactgcacccagmcacaaatctattatttttaaaagttaagaagaaattttttttttgagatggagtctcacagtgttgcccaggctcagtgcagcgatgcaatcttggcttg

SEQ ID NO: 14641 - DNA, 201 bp, Homo sapiens
atgttagctaggctggtctcaaactcctgacctcaggtgatccgcccacttcggcctcccaaaaagtgctgagattacaggtgtaaaccatcctgcccgayctaaaaaattaagatttatcaaaacttacatacacaaacccttgcagataatacatggcaccattcacagtcaagagaaatataaacaaacattaaaatg

SEQ ID NO: 14642 - DNA, 201 bp, Homo sapiens
caatagttaagtttttggagaatcaaaagttatatgtgaatttcaactgtgtgggaaggttggcacctctaagccctgcattgtttaaggggtgactgtaygtacaaatgcaggcatgtatatttcctagctttgtccactaaaagccctgttagtaatgacacctcagtagcaataagcccatctagcccccagatcttg

SEQ ID NO: 14643 - DNA, 201 bp, Homo sapiens
caaaacaaaaaaaaacttctaggtccagtcctttgtgaggagtatcagacatcagaatctagagtgtgtttccacttctgtgcttcatagccataaagaargaaattgacctgctcttccaaatacatgggaatcctccaactcctaccaagaagaaagcagtactgttgcggccagcaccaaacaatggaagaatattag

SEQ ID NO: 14644 - DNA, 201 bp, Homo sapiens
ccacgtgcatccctaggtgcgtctagccagccaggagctcttggaaaagctgttggagcatgtctccttccctaccccttccccctccctccccaactctyctctctgtcagcccctcagtccctctcagcccgcctgcccgtccctgacccccatgcttctatgtctgtgctcctcccaattcttcctggaagagctctt

SEQ ID NO: 14645 - DNA, 201 bp, Homo sapiens
ggacaggcaggattagcctcgagtttattccatcccagagggacaatacaagactgtcccctagcctgggaggaaggccccactgtgaaactgccctggcygggtgttagaggacagagccaagcctgcaaccttggccagccccttcctggtaagtggccatgggcaaatcacttccaccttctgagcctcaagcaagac

SEQ ID NO: 14646 - DNA, 201 bp, Homo sapiens
aagctaattaaaaaaatacttttatctgcatcaagtgcttgctagagattctctggctacatcttcaccatgtcccaagaggtattattaccccagctttmcaaatgaggaaaccgagtctcagggtgataaagtgacaagacaggttttacacaccatgcaacaccaccagggaatgtcatcaccgccccggcacacagt

SEQ ID NO: 14647 - DNA, 201 bp, Homo sapiens
aagacaggttttacacaccatgcaacaccaccagggaatgtcatcaccgccccggcacacagtaggtgtcagaagtagctgctattgttattattattagwttcccccccccgcaaaaaaatactttctgctgagatacagctttagtcatacattctcaattaaataattttaaaagttgagctaggcccatgctctcat

SEQ ID NO: 14648 - DNA, 201 bp, Homo sapiens
tttaaattccacaacttggatgaatggaccaatttcttgagagacgcaaactactaacactcaagaaagaaaaatagataacctatagatatcctatataytacatgtccaaaaaatggagtttatagttaaatcatctcccccaaaaaaactcaagcccagacactttcatgaatgacttcccaactcattttgtgaagc

SEQ ID NO: 14649 - DNA, 201 bp, Homo sapiens
tgcaaggctgtttcaacatttgaaaatcaatgtaattaacagattaaaagagaaaagccatatgatcagaaaaatactttaaaaattcaacatacattcakgatactctctaaacaaactaggaatcaaatctgatgaagagtatccacagaaaatcccacagctaacatacttcatggtgaaaaattaatgctttccttt

SEQ ID NO: 14650 - DNA, 201 bp, Homo sapiens
tttgaaaatcaatgtaattaacagattaaaagagaaaagccatatgatcagaaaaatactttaaaaattcaacatacattcatgatactctctaaacaaastaggaatcaaatctgatgaagagtatccacagaaaatcccacagctaacatacttcatggtgaaaaattaatgctttcctttaagatagaaataaggcaa

SEQ ID NO: 14651 - DNA, 201 bp, Homo sapiens
caatgaacaactggaatccaaagttaataaaaacagtaccatttataatagtgctgaaaatacttaggtatacatagctaacaaaatatgtgtagtttctkcaggctgacaattacagaacaaaaaaaaacctaaataaatggagagatctgtgttcattgattgcaagactcaatagtatgaagatgttaaatcttctaa

SEQ ID NO: 14652 - DNA, 201 bp, Homo sapiens
ctgaaaatacttaggtatacatagctaacaaaatatgtgtagtttctgcaggctgacaattacagaacaaaaaaaaacctaaataaatggagagatctgtrttcattgattgcaagactcaatagtatgaagatgttaaatcttctaatttgatctagattcaacacaattccaattccaatcccaggaagctatattttt

SEQ ID NO: 14653 - DNA, 201 bp, Homo sapiens
catagctaacaaaatatgtgtagtttctgcaggctgacaattacagaacaaaaaaaaacctaaataaatggagagatctgtgttcattgattgcaagactsaatagtatgaagatgttaaatcttctaatttgatctagattcaacacaattccaattccaatcccaggaagctatattttttttttaggtatttacaagc

SEQ ID NO: 14654 - DNA, 201 bp, Homo sapiens
agagaagaaaggaaccgacttaagtagctgggaaacattggttcaaccgatcttataagacagaaaccaagaagagtcgtatataaacactgtacttcagytgggaatttttctccctcctccaaagtatatgggttaggggccaggtgtggtggctcacgtctgtaatcccagcactttgggaggctgaggtgggtgaat

SEQ ID NO: 14655 - DNA, 201 bp, Homo sapiens
agtagctgggaaacattggttcaaccgatcttataagacagaaaccaagaagagtcgtatataaacactgtacttcagttgggaatttttctccctcctcmaaagtatatgggttaggggccaggtgtggtggctcacgtctgtaatcccagcactttgggaggctgaggtgggtgaatcacttgaggtggggcgtttaag

SEQ ID NO: 14656 - DNA, 201 bp, Homo sapiens
cctcctccaaagtatatgggttaggggccaggtgtggtggctcacgtctgtaatcccagcactttgggaggctgaggtgggtgaatcacttgaggtggggmgtttaagaccagcctggtccacatgaggagacccagtctttactaaaaatagaaaaaaattagctaggtgtggtgatgcatgtctgtagtgtcagctcct

SEQ ID NO: 14657 - DNA, 201 bp, Homo sapiens
catgaggagacccagtctttactaaaaatagaaaaaaattagctaggtgtggtgatgcatgtctgtagtgtcagctccttggaggctgaggcaggagaatygctcgaacccgggaggtggaggttgcagcgagccgagatcgtgtcactgcactccagcctgggtgacagagcaagactatctcaaaaaaaaaaaaaagta

SEQ ID NO: 14658 - DNA, 201 bp, Homo sapiens
aggagacccagtctttactaaaaatagaaaaaaattagctaggtgtggtgatgcatgtctgtagtgtcagctccttggaggctgaggcaggagaattgctygaacccgggaggtggaggttgcagcgagccgagatcgtgtcactgcactccagcctgggtgacagagcaagactatctcaaaaaaaaaaaaaagtatatg

SEQ ID NO: 14659 - DNA, 201 bp, Homo sapiens
gatcacctgctgcttggtacatacttagcacaggggtgctgtccagagactcagtccagagaaggcaggtggggagaacagaccctggcagaagccagtamgtggagggagcagccccagcttggctggcttcaccaatgaagtcgatatggtcaggctcctggcaaagtccagcacccgtgatagacctgtagagcagca

SEQ ID NO: 14660 - DNA, 201 bp, Homo sapiens
atagtaactgatgtagtttggatgtttgtcccctccgaatctcatgttgaaatgtgatccccagtgttggaggtggggctgggaggctaccatagccacargcatagtagtgaccccaagattgggacattcatgagaacagagatcctgttccaagaagcctcagccaggatggcagttggtccccaggagcagaaatga

SEQ ID NO: 14661 - DNA, 201 bp, Homo sapiens
gctactgcacctctctgagcctcagttgttcatgtattaaatgatgttattaatgtccgccacagggctaccggtaggatgaaataaaagtgtatctaatrtgttgagtacagtgcctgattcataataactggttaataaatggcaactgctatcattatgattaatttcaaatgctagtcaatctcagttgtccttaaa

SEQ ID NO: 14662 - DNA, 201 bp, Homo sapiens
tctctgcaacttttcaggccaggaaactgtacagatctaggagaagtcctcggagatcatctagcccaagtgtccaagcagggagactgaggcccagggaraggaaggacatgcccaccttcacacagccagtcagtggaggccccagggctcctgtccttccctgctcaaggaaaccccaggctctgtcaggcctcggtt

SEQ ID NO: 14663 - DNA, 201 bp, Homo sapiens
acagatctaggagaagtcctcggagatcatctagcccaagtgtccaagcagggagactgaggcccagggagaggaaggacatgcccaccttcacacagccrgtcagtggaggccccagggctcctgtccttccctgctcaaggaaaccccaggctctgtcaggcctcggtttaaataacagctctgataacagaaagaatt

SEQ ID NO: 14664 - DNA, 201 bp, Homo sapiens
gatcatctagcccaagtgtccaagcagggagactgaggcccagggagaggaaggacatgcccaccttcacacagccagtcagtggaggccccagggctccwgtccttccctgctcaaggaaaccccaggctctgtcaggcctcggtttaaataacagctctgataacagaaagaatttgatcttgggcaactcagtttaag

SEQ ID NO: 14665 - DNA, 201 bp, Homo sapiens
tgtcaggcctcggtttaaataacagctctgataacagaaagaatttgatcttgggcaactcagtttaagtctgtaagtcttggtttcttcagctgtaaacygaggactgacaggcgccataccatagtagttaagaacgtggactcagagtttgctggagtgagttaaaatctcagttctagcacttagctgggtggcctt

SEQ ID NO: 14666 - DNA, 201 bp, Homo sapiens
aataacagctctgataacagaaagaatttgatcttgggcaactcagtttaagtctgtaagtcttggtttcttcagctgtaaaccgaggactgacaggcgcyataccatagtagttaagaacgtggactcagagtttgctggagtgagttaaaatctcagttctagcacttagctgggtggccttggacaagttgcttaaca

SEQ ID NO: 14667 - DNA, 201 bp, Homo sapiens
tttcaaacacagctggtctgttttcctcttacagacatcactgacttgcttcactctctgtgttggctgccaggaagctcagagccaagtctgtgtcctgyctgtagctgggtctgaacccccatgcagcaggtgttctgggaaatcactcatcctgcttcatctcttttcctctgcccccattttccttctccccagtct

SEQ ID NO: 14668 - DNA, 201 bp, Homo sapiens
ctgaacccccatgcagcaggtgttctgggaaatcactcatcctgcttcatctcttttcctctgcccccattttccttctccccagtctcctccacctattyaaaatctttactctgtgtttagaaactgtctctaatctttacgtttctggggaaaataaatggcatttaaacttcatacagactaaatgcaatgtggtat

SEQ ID NO: 14669 - DNA, 201 bp, Homo sapiens
caaaggccccacctcctaatactatcagcttgtgggtaaggatttcaatgcatgaattttggaggaacacaatctgtggcaatgtttactataataataakaattccccatttgatctttgcaataaccctgagaaaggaatgttacctattattattatatagtaaagggaagcaaggttaaacaagttaatgatgtaaa

SEQ ID NO: 14670 - DNA, 201 bp, Homo sapiens
tgggacttgaacctagtcttccctactgcaaacccagagctcttcccacaatgcctgtttcctaagagaacctgacagacgtatcgtctctgtactccagsctgtctgccatgatgtggcttggtggccacatgtgaccttttcttcttgtctgcatggaaaatgaaatctcctgatattagggcatgcaaggaaggccct

SEQ ID NO: 14671 - DNA, 201 bp, Homo sapiens
taacctatgtctcagtttccccaactggaaaatgtgggtagtaataccctacccctcagggtcacgtgaggagtcaactagatgacatgtgaaaagtagaycacagacgctgggcacacagttagccctctttaaaatgggagccagtaatatttcaataactgctggttgtctggattgaatgccaggcctgaagctgcc

SEQ ID NO: 14672 - DNA, 201 bp, Homo sapiens
gtggggctcacaaggacacgcaaggggtggctgcgggcagattctagaacggttcctaatccatgagggaagctgcaggaacatgcaggttaagtgtgtcyccggtatgaaagagggattcatggaaaagaaagcaggggaccagaatagctgaaacctagcccaaagagacgagaaacacctggccacaagacccagtga

SEQ ID NO: 14673 - DNA, 201 bp, Homo sapiens
gagcacagtgtgactgcccacgggacagggagcggtgggagaaccttcaggcaccaggaaagacacatttcattagggaaagccatccaaccagatttctrtttcggaagttattcgtccaagagttatcaagtgttctgtgccctttaaatgtgttatctcattgaattcttcaaccaccttgggcagaggtggtgaaca

SEQ ID NO: 14674 - DNA, 201 bp, Homo sapiens
ctagcagatgctcagtaagtatgagctactgttggttctgttgcacacatgacaagtcttgttgggaaacctgacaatgtcacacagtcgcagccaactcrtggccaagtcagacctgggttctgcccacctctggaactctgaactctttaatttgctgcttctctctgggaccctatctgggaccactgcttgggaaca

SEQ ID NO: 14675 - DNA, 201 bp, Homo sapiens
acagtcagagcctaagagcaacacagatttgttatctgacagtttgggaggttggaagtataaagtgtgccaaaaggaccacacttctcctagaggctccrgaggagaacccgcttccttgcctcttccagcttctaggggccacctgcattccttggttcatggccccatcctccatcttcaaggctggcagcacggcat

SEQ ID NO: 14676 - DNA, 201 bp, Homo sapiens
catcacgtctccctttctctgacctcctgattacatcttgcaaggacccccgtgatgacacggggcccacccagacaatcccccacgtcaagaccatcacrtactcacatctgcaacatcccttttgctatataagggttccactcacaggttccagggaggaggaggtggataccttcagacttgaggatacacttataa

SEQ ID NO: 14677 - DNA, 201 bp, Homo sapiens
ttccccactctgaaaagacaggaacacaggaagagaagggcctcctgctcccttcacccactctgctttgggcacggttgtgagaggctgtgatggcaggwgcagtggctgccatcttgcagctgtgaagcaatgagcccaaggcaagagccaacaacaggaaggagagactcactccctagcaaaccagagctcgggctg

SEQ ID NO: 14678 - DNA, 201 bp, Homo sapiens
cacccactctgctttgggcacggttgtgagaggctgtgatggcaggtgcagtggctgccatcttgcagctgtgaagcaatgagcccaaggcaagagccaayaacaggaaggagagactcactccctagcaaaccagagctcgggctgcccagccctacacctctgaagagaacagcgaacacctgaatgtgtgtgctccta

SEQ ID NO: 14679 - DNA, 201 bp, Homo sapiens
tccagatgctgaccaagatgactggtgctgtgtgcaggcaggctctgctgtctctcctggatggagccaccactgtggctgtgcgagggccggacccaaaragccagagccaggggacactgaagggaccaggcataagcctgagatatgagcctgacctgtcccagccactctctagctgtatgacctgggataattcat

SEQ ID NO: 14680 - DNA, 201 bp, Homo sapiens
ccttcccccaaggttcattttccacctttgaagttcaccttaactaaaacaagaaacatcattactggctccagaagttctttgtgtttttacttagccaycctcacccctcttgaaaacgagctttgcacaccttctttttcatggtcttgctaaaggtctttgcatacctagaattgattttgccttcttccctcgcca

SEQ ID NO: 14681 - DNA, 201 bp, Homo sapiens
gaattgattttgccttcttccctcgccagctaagagaatgcccagcaagtctctgttgtctacagaaaaaaagtgtcccccacccacacacattcccagcycagcatctcagcctgcaggagctaactccattctacttctccaaccttgtttcacagccaaaggaatcgcttaggagctgtcttgctctctctaacctct

SEQ ID NO: 14682 - DNA, 201 bp, Homo sapiens
tgacagtgatttaagagcagccacgtctgactccctaagcactacatctgttcttccctctgtactttgtcttcagcctcacgggacaggtctcataccayggcacagagaaggacactcctgaaaagggctataaaactataaccagctccaggggatggcataaggattttcaggggtaacttggctacatgtgtgatt

SEQ ID NO: 14683 - DNA, 201 bp, Homo sapiens
agtacaatggggcaatcacagctcactgaagcctgaatctcctgggctcaggtgatcctcccatctcagcctcccaagcagctgggaccacagacacatgmcatcatacccggctaatttttttaaaaatacttgtagagacagggtctcactacgttgcctaggctgatctcaaactcctgggctcaagcaaccctcctg

SEQ ID NO: 14684 - DNA, 201 bp, Homo sapiens
ggcaatcacagctcactgaagcctgaatctcctgggctcaggtgatcctcccatctcagcctcccaagcagctgggaccacagacacatgacatcataccyggctaatttttttaaaaatacttgtagagacagggtctcactacgttgcctaggctgatctcaaactcctgggctcaagcaaccctcctgcctcagcctc

SEQ ID NO: 14685 - DNA, 201 bp, Homo sapiens
cttatatgagttattgagactcccagaggcaccttacctaacccccaccctcccatctgctcaatccttgcagacactggcctcagtcttacttcagggcytttgcacatgctgtccttgctgcttgggattttcagtccccgaatggcacatggcagctccttctccctctctaggtctcagctcggaagccgtctcctc

SEQ ID NO: 14686 - DNA, 201 bp, Homo sapiens
ctattggtgtccctgcccccttctgcaagttagaacaccccacagtgctttgggcaaccacccctctcccactggctacagtcttggtggtcttgtcaatyaaagtccctagacatccctgccagcccgtgaggtgctccctctttgggaatcttcaggggaaggacactgagaacggaatggtggacatccccctactgc

SEQ ID NO: 14687 - DNA, 201 bp, Homo sapiens
gggaatcttcaggggaaggacactgagaacggaatggtggacatccccctactgcaggctgcaccctgagattctcggcttcaattctgggactgcccctrtccttccagtacatccctgctctgtaaaatggccagggctggtttctgttacttatgcccaagattcacactgcacaagattccctgtggagcagcaatc

SEQ ID NO: 14688 - DNA, 201 bp, Homo sapiens
cctgggagtctggaaggtgggtacaagtagacagggtctatgtctaccagcccccaataaaaactgtgggtgctctctaatgagctcccctgatagacaayatcccacacctttgtcaccatttgatgctggaggaattagtgtgttctgtggaactcacagggaggggacccgtggaagcctgtgcctggtctcctctgg

SEQ ID NO: 14689 - DNA, 201 bp, Homo sapiens
aaaactctacagcctggggtggaagctgaggtctgccatattgcttcaccacaagacgcttgcagctgagatgaagacattgacccaaggagacactcacyaagcactaggattaacaataaacatagcctgtgttagggactgaatgtatttccctccagatccatacgccgaagccctatcctcaatgtgatggtactt

SEQ ID NO: 14690 - DNA, 201 bp, Homo sapiens
tcaaatccctgttaaggtgaagaggcaggatggagaaagcctgagaccaagtgggcttcccccagagcaaagtggaaagtggttcagggcacaggagacgycagcagaagcctctgaggccaccacatcctccatggcccctgtcttcctgacctctctttcctctccctctcgtctctgcctcctgctccctcttccatg

SEQ ID NO: 14691 - DNA, 201 bp, Homo sapiens
acaccacagagagccagcgccggagagggcctgggccaagtcgctgagtctcccacaggctgcccacccccagtattttacagaaggggaccctgaagccscaagatgggaagggaaacatagggttcaggagtacaacaggcacagcccaggacgcaggaggccagccctgggtctccttcccctctgcacctcagtttc

SEQ ID NO: 14692 - DNA, 201 bp, Homo sapiens
agtcgctgagtctcccacaggctgcccacccccagtattttacagaaggggaccctgaagccccaagatgggaagggaaacatagggttcaggagtacaasaggcacagcccaggacgcaggaggccagccctgggtctccttcccctctgcacctcagtttccccatcacaggactctgagattagaaactcagacagcc

SEQ ID NO: 14693 - DNA, 201 bp, Homo sapiens
gttacgtgcaccagaccactcattttacttctctcaccagagcagcctacagagtgagtagcctcaggcagcagagcttgagcctgtgagacagagacccrgcaggtccctgttgtgccattagcttggtgggtgtcctagggttacttctccccttgctaggtcttggttttgccctctggcaatgagcaggttggacct

SEQ ID NO: 14694 - DNA, 201 bp, Homo sapiens
acttctatgtctttctgattcagggctgtatttagaaggaaagactgtatttgctctcatggtggtcacaggtcattaaagcagagagatcaggggctctrggacacccagggataactccaggcaggctgagggttgcacctatgggcacctgacttctgggcctggaaaactgtcctcagtttctcccatcccagcagt

SEQ ID NO: 14695 - DNA, 201 bp, Homo sapiens
cagagagatcaggggctctgggacacccagggataactccaggcaggctgagggttgcacctatgggcacctgacttctgggcctggaaaactgtcctcaktttctcccatcccagcagtgagcacttgagctatgctggctggtgttgctaccaggtcactgaaccagatccagagcctgggggctctgaggttccacag

SEQ ID NO: 14696 - DNA, 201 bp, Homo sapiens
ggtcactgaaccagatccagagcctgggggctctgaggttccacagggtttaagaaaacaccagaaggacaattggagcatctcagttatggcaggatacrcaccccaactcggcactatcagcagcagcaggagattttgacaggacttgaaggccagagggctgcccctccgaggccacggctgtgtccttgctctttg

SEQ ID NO: 14697 - DNA, 201 bp, Homo sapiens
tctcagttatggcaggatacgcaccccaactcggcactatcagcagcagcaggagattttgacaggacttgaaggccagagggctgcccctccgaggccayggctgtgtccttgctctttgtaggaagctgcctgcaggtggtaagtcacatccaacacatccatctgcacgctagtgactctccatcaaccacacccctc

SEQ ID NO: 14698 - DNA, 201 bp, Homo sapiens
gcctgcaaccccagcactttgggggacagaggcaggaggattacttgaggccaggagttcaagagtagcctggacaacatggtgagacgccacaaaaaaawtttttttttttaaatttaaaattatccaggcataatggtgtgcacctgcagtcctagctactcaggaggctgagttgggaggtttgcttgagcccaaaag

SEQ ID NO: 14699 - DNA, 201 bp, Homo sapiens
ctaaatgcatgctaattcccttcctgaggctgccagttccttctcccaaacagaggtcccagaaattctctaaacctcgaatctatatggacacaaacacrtgtcccccaactttcttctttttaagaaacatccttctttaatccacatttcctcgtatctgcgctgccttcaacactcagctcctttcccacgacctcc

SEQ ID NO: 14700 - DNA, 201 bp, Homo sapiens
aaagtcccttcccatttagccctgctttgagggaggacagaaattggtgatgcggactctgccccagtagcatattttaatgtcatgagaaagtaaaaccytaattagcactctgtcttccaagctccttccatctgtaccattttcatctgtgttaattacctcttacagggaccactaactgcaacagcttcccagcct

SEQ ID NO: 14701 - DNA, 201 bp, Homo sapiens
gtgcatcttgggcctgtgcgcctggtcctgatgcctggccagcctcatctcctgccctgccacctgagctgtcttataggatcaagtactccaagctcttytccacttcaggcctttgcacgtgatgctctgtccctgaaagtacatatctcaacatacttacttatgcaaatgattattttattatctacactcttctca

SEQ ID NO: 14702 - DNA, 201 bp, Homo sapiens
gcctggcttttagtctgttataatttaagtaaattgctttataaatgttcttttaagttttgtctgtttattctttttttttctttaaggaagaacaagaktctcagagtcataaatatattcactcaagatgagccccaatgggtttgcaatggcacattttgttgtctgggatcgatgtccgaagcacagagatccatc

SEQ ID NO: 14703 - DNA, 201 bp, Homo sapiens
caagatgagccccaatgggtttgcaatggcacattttgttgtctgggatcgatgtccgaagcacagagatccatcaggaatatctgtttatatccatatcrttttctcattccatgaatagatacgttgatgggatttagtctcctcccagactcttgacatccctgtgcctcatcactttttgacaattctcagttgaaa

SEQ ID NO: 14704 - DNA, 201 bp, Homo sapiens
tcttttggcgtttttctgaagttttcaagttttaaaaattaagtccaggctcagcgtggtgactcacacctgtagtcccagcagtttgggaggtggaggtrggtggattgcttgagcccaagagctcacgaccagcctgcgcaacatggtgaaaccccacgtctacaaaagaaaaaaaaatacacacacacacacaaatat

SEQ ID NO: 14705 - DNA, 201 bp, Homo sapiens
ccccacagctagaaagtggcagagccagtcttggaaacccagggcttcggagctcaggctcgagcactgtggggcatcccttctctctgctgttggggcaragacgcaacccctcaagtcaacaaaacctaggtgtaaatcctggctctgtcactttccacctttgggatgactggcaagtgacaaactcttggcaatttt

SEQ ID NO: 14706 - DNA, 201 bp, Homo sapiens
caatgacatgtttgtgaggactatgggccaggtttggtggtaggatatctgagtaacagaaaggcaaagggacctgcccaaggtcacagccaagttacacygtcagatgaacccaggtccatctccaaaacccatctctaacctcttgggtacataccacccttcctcagattttccagtacgtcagttgaccttacacaa

SEQ ID NO: 14707 - DNA, 201 bp, Homo sapiens
tttagaatccaggaaagaggacatttggggacctgtttatggaaggctgatatatttgctttgcatacagagttgagaggatgctgatattaggaaactcmggtggagaggaaaaaaatcatgacgaaactggctgctaactgaagcaaagccacagccaatttagcaaaaggaacacaaattctcaaacggggaaggagc

SEQ ID NO: 14708 - DNA, 201 bp, Homo sapiens
aggaaagaggacatttggggacctgtttatggaaggctgatatatttgctttgcatacagagttgagaggatgctgatattaggaaactcaggtggagagraaaaaaatcatgacgaaactggctgctaactgaagcaaagccacagccaatttagcaaaaggaacacaaattctcaaacggggaaggagccaaaggtgct

SEQ ID NO: 14709 - DNA, 201 bp, Homo sapiens
ctggggtccctgagaagggtaaaccaaaggcttcccttccaggtcataaaagaaccttgcaagaaatcaccagttggagcctaatcccctatggacgcctrcttcggtgcaaagccctttgcaggatggaggggggattatgactctgaggagactgtacatgtgattcaagcttgagcagtcaggcacatgagcgagggg

SEQ ID NO: 14710 - DNA, 201 bp, Homo sapiens
gcaggatggaggggggattatgactctgaggagactgtacatgtgattcaagcttgagcagtcaggcacatgagcgaggggctgcaggcactgacaggtgyaggcaggctgtgtaccgctggtgcggctgccggcaggcagagttggaaagcagcaacacacggacaatccaattggtcggggggttaaagaatcacactt

SEQ ID NO: 14711 - DNA, 201 bp, Homo sapiens
gtatgcagcagggcctaaggcagcatccctggtctgtggactctctggccaatttatcaagcacatttggctaaaaacctttgaaaggtctacttttttaytattattagtttggctcctgttcaagatattttttcaaaaatcaaacatttcaacataattgcaaatagtccatggcttaccttatctggacctgtcact

SEQ ID NO: 14712 - DNA, 201 bp, Homo sapiens
tatcctagaataaaataaggacataggcagaaaaactggtgaaatttgaatgaagtctgaagtccagttaacagtaatgtacttttaccataaaatccccracatggtgactcgcagcactgcagtttacaaagaacggctccccgtggagaaatcctggttaagggcagtctgtgcctagtagaaaagctggggcctctt

SEQ ID NO: 14713 - DNA, 201 bp, Homo sapiens
cgaagacgttgcggcgcgcgtggtaagcgttcaggcagtgggtgaactgctcccgctccgcctcgctcagcagcgcggtcagcgcttggtgcagctggcgyacgttggcagacagtaaccgcagccccgcgcccccgccgccgcccgccccggccgccgagcccagcgagccggtggaggacgagctcaccgacaggccgt

SEQ ID NO: 14714 - DNA, 201 bp, Homo sapiens
ctgattagagaagcccctagcaaaatcatccttgccatgtacacatcagcatggttcactggggcatccattcatgcattcattcctttcattcattcagwtggtacttaggtccctctgctctgccagactacattctggggattcagcaggagcaagaccgccatggtccctgccctcctggagctgatggtcaggagc

SEQ ID NO: 14715 - DNA, 201 bp, Homo sapiens
tgatggtcaggagctgtctcattgtgtgcatcaaatgtgatgatgggtgactggatgcaagccctgtgaggtgtgaggtaagggtcccaggcaaggcttcycagctggcatcctcttatctgagcctcagcctccaacccatttcagcatcagagcactatggtcagtactgcagatggacttggttaaataatccctgct

SEQ ID NO: 14716 - DNA, 201 bp, Homo sapiens
agtcacacagccagtcagtggcagagccgggattcaaactggggtctccaactcccttcgccactctggccctgagccccctcaacaagtagctggtcccmcccttcactgtgtcatcaggtagactgacctgaagaggacagggacccccaaggaccacagagcctggccttgctgtactcactgcgcgtctggggcagc

SEQ ID NO: 14717 - DNA, 201 bp, Homo sapiens
gaatagtgacaatcctaggcaggggctggcgggtgttggcgccaccctcgatggcgatgcccagggtggccgcacttttcttcacacggaccagagtggaygtgggctccagaagtccaggctgtgggtattaggaaggacaccactgaggccttcgcagttggcaggcctggccagggggctgggccgggccgtgacacc

SEQ ID NO: 14718 - DNA, 201 bp, Homo sapiens
ctgtctggtctgggtggccagagggtgatgggggcagaaggcagcccccagccactgtggcctctgcagaggggcttttcaggtgcgggggtgactggacscgtgggaaggggccgatggggtgttggttgaccagggccagatgggcgtccagcggcctcttggagctggggttggcaggggagacggaggcatagatgg

SEQ ID NO: 14719 - DNA, 201 bp, Homo sapiens
tgacggtggtggaggtgccgtggctgcctgtggatgaacccgtgtcactgtaggagaccatggagtaggtgtccccagccccggggcctgggggctgccgygccttcatggactcaatctcacgcctcagcaccaggtggtcgaagcgttctaggtcttgcggggaaatggtgcctctcacctcagagaggagtgagaact

SEQ ID NO: 14720 - DNA, 201 bp, Homo sapiens
ggaaactccggacagactggcagcgtccagcctcccaatcagcagtgtgcacggcacctccaaaaccacccgaggtgggctcctgagttgttgccaacccygcaggaccaggcaggtaacacaaggagtggagggaagaaatggtgattgacaggcaacctcagggtcaggccaaccctcaggagcttaggggccggtgaa

SEQ ID NO: 14721 - DNA, 201 bp, Homo sapiens
aatgctgaagccagttgggaggcagggcacgggtcaccttggcgtgggtgttgagcagcttgaacagggccatgacgagggcctccacagagacgctgccrccacggtactcatccaggtagtaggccatggtggcgtgttcctgctcgttcagcaggtgccgagcctgctcctccagcagcactcgtgtctggttcccca

SEQ ID NO: 14722 - DNA, 201 bp, Homo sapiens
catgtcctgccaatggagggccctggtgtggggactgcaggctgagaggagagccagggcggtggagggatgggaggcagctatcactggctttcagaaawggccctggggtctggagattggagcgagcagagtggccagaccctgccgagttcgccatggtctccctgatccgggaactggcgatccacttggtctcgt

SEQ ID NO: 14723 - DNA, 201 bp, Homo sapiens
cacagagacgctgccgccacggtactcatccaggtagtaggccatggtggcgtgttcctgctcgttcagcaggtgccgagcctgctcctccagcagcactsgtgtctggttccccaggctgctcagggtcacctgggagccggctgggcccttgtaaaatcctggctgcaagacagaaagatagaagcccaggaattctta

SEQ ID NO: 14724 - DNA, 201 bp, Homo sapiens
ttacctctctgaacctcaggctttctatctgtacaagagggacaacaataacacccacttcgacaacatcacgtaactgatataatctagatgatcaacamcaatgttttgagcacctactctgtgtagggctctgtactaggtagacactagggaataacaatggtgacaaaacagataagagctcctgccctcccaaac

SEQ ID NO: 14725 - DNA, 201 bp, Homo sapiens
gtggctcacgcctgtaatcccagcacttcaggaggccgaggtgggaggatcatgaggtcaggaaatcgagaccatcccggccaacatggtgaaaccccatytctactaaaaatacaaaaattagccaggtgtagtggcacacgcctgtgatcccagctactcaggaggctgaggcaggagaatcgcttgaacctgggcggc

SEQ ID NO: 14726 - DNA, 201 bp, Homo sapiens
actacaaaaattagctgggcgtggtggcgcatatctgtaatcccagctacttgggaggctgaggcacgagaatcgcttgaacttgggaggcggaggttgcrgtgagccaagattgcgtcactgcactccagcctgggcgacagagcaaggctccatcaaaaaaaaaaagaaagaaaaaagaaaaaagaaaaaaaaaagatc

SEQ ID NO: 14727 - DNA, 201 bp, Homo sapiens
cctgctggctacatcaacacttggctgaggtctcaactgcagtgctcatcagtactgagcagtctctgaagctccaggctgataaggggctggggacacaraggtgggacaccaaccctgccattggtagctcagagacaatggggtcagtcgacaagcaaacaagcaacagggagactgcagagagagcatccaatgggc

SEQ ID NO: 14728 - DNA, 201 bp, Homo sapiens
ttaagcctgagggcagtgggttgccatggagatgtggtcaagtttgccttctacgaagatcccctttgctcacatcctctccagccaggctggaacaccayggatgtgtcagccttcacactggctgttgtctctgtctgcgactcttctgcttggctatccatccacaaggcatgctgtcgctcacctccaaaacctaac

SEQ ID NO: 14729 - DNA, 201 bp, Homo sapiens
ggactgtcccttgtcacatcgattacacctgaagttcagagagggaagagacttgtccaaggtcatctgaccgttctacagaaggtaaggtttctaacccrggtctgggtcaccccaacgcccatactacactgtcccaaccccagaaatgaacagggccttgatgtcataggaacctgaggcccccatgagcaaccctct

SEQ ID NO: 14730 - DNA, 201 bp, Homo sapiens
gacttgtccaaggtcatctgaccgttctacagaaggtaaggtttctaacccaggtctgggtcaccccaacgcccatactacactgtcccaaccccagaaaygaacagggccttgatgtcataggaacctgaggcccccatgagcaaccctcttggaaatgagagagaaggcagccatagctggccctgtcctcagcctcat

SEQ ID NO: 14731 - DNA, 201 bp, Homo sapiens
gcctgtggccccagttactcaggaggctgaggtgggaggaccacttaagcccaggagttcaaggctgtagtgagctaccccaacagagaccctatctcttaaaaaaaaaaaaaacacaaacaggatcacatcacatccttactcaagattctccagagtatcccatggttttagggttaaacacaaacgcctcccgctcct

SEQ ID NO: 14732 - DNA, 201 bp, Homo sapiens
cctgtggccccagttactcaggaggctgaggtgggaggaccacttaagcccaggagttcaaggctgtagtgagctaccccaacagagaccctatctcttaaaaaaaaaaaaaacacaaacaggatcacatcacatccttactcaagattctccagagtatcccatggttttagggttaaacacaaacgcctcccgctcctg

SEQ ID NO: 14733 - DNA, 201 bp, Homo sapiens
ctgtggccccagttactcaggaggctgaggtgggaggaccacttaagcccaggagttcaaggctgtagtgagctaccccaacagagaccctatctcttaaaaaaaaaaaaaacacaaacaggatcacatcacatccttactcaagattctccagagtatcccatggttttagggttaaacacaaacgcctcccgctcctga

SEQ ID NO: 14734 - DNA, 201 bp, Homo sapiens
cctggctccatcactcactagccatgcaaccttgggcaagttgcttctcctctctgagctttggttttcttctttgtaaaatggggatcacagcagtactcacaactcctagctcctgggatggtcaaagaagatacgaatggaaagcactaccacagtgtcatagagaacattcaacaaatctcagccactattgttatt

SEQ ID NO: 14735 - DNA, 201 bp, Homo sapiens
ctggctccatcactcactagccatgcaaccttgggcaagttgcttctcctctctgagctttggttttcttctttgtaaaatggggatcacagcagtactcacaactcctagctcctgggatggtcaaagaagatacgaatggaaagcactaccacagtgtcatagagaacattcaacaaatctcagccactattgttatta

SEQ ID NO: 14736 - DNA, 201 bp, Homo sapiens
ttccccggcttttcttgaatgcctcaccccagttgggagtttccagtatagaaagtggttacaaagacagactttacctctctcctctgcaccggctttgmcactcaggggaggcttgctgcctctgcctccatgactctaacagagtggggtctgtgctgcatttcaagcattcaccaccatttactgcaatgcctactg

SEQ ID NO: 14737 - DNA, 201 bp, Homo sapiens
gcctgcagcagccagatctgaaaacttcatctcatcatcaactctgcctttacccccctgagcagatccttcagcaaatcccgtcctccacccccatcagccccctgacctcggttcctacctgctccctcccacgtgagcgagctagcatcctcatcactgtgcatttacatctaaactggccagacatagtaccagatt

SEQ ID NO: 14738 - DNA, 201 bp, Homo sapiens
cagcagccagatctgaaaacttcatctcatcatcaactctgcctttacccccctgagcagatccttcagcaaatcccgtcctccacccccatcagccccctgacctcggttcctacctgctccctcccacgtgagcgagctagcatcctcatcactgtgcatttacatctaaactggccagacatagtaccagattaattt

SEQ ID NO: 14739 - DNA, 201 bp, Homo sapiens
tagttcccactcaatttttctgtaaacctaaagctgctctaaaaaaataaatctattggtccggcgcagtggctcatgcctgtaatcccagcaccttgtgsggccgaggtgggtggatcacctgagatcaggtgttcgagaccagcctggccaacatggtgaaaccccgtctctaccaaaaatacaaaaattagccgggca

SEQ ID NO: 14740 - DNA, 201 bp, Homo sapiens
tatctatagcatgctatcttttatagaagaaagaaagcatatagatataaatctgcttatttttacaaaaagaaacaaagaggaataaaccaaaaacttayttggttgcctttaaggagcaggtgagaatgggtagaagggacatggggagtcgtactcggagtgtacctttttgtatagttttgatgttttagtacttag

SEQ ID NO: 14741 - DNA, 201 bp, Homo sapiens
ttcctgcatgttagaaataactagaagactgctcaccctaatgacttatttctgttactactatttcctcagcaacataggaaaggtaaagaataaaaatwaaaattaaaaaatgtatcattactgtttcctgttatcaccactaccctcatgctgctgtatcttctgccattttcaccatgcttttacttaaacacatcc

SEQ ID NO: 14742 - DNA, 201 bp, Homo sapiens
atgcttttacttaaacacatcctgaatggccagaagaatcctccgggttccaaatctaaaaagcagagtgtgcagaaacatcgggcaggtgtcaccaacakgctgacggcagagaaccgggcagaagtggggagagctggctggccggctgccaaggggcgtcagcctgagtttccatcacgcaaattcagggttataggg

SEQ ID NO: 14743 - DNA, 201 bp, Homo sapiens
ggcaaaatttttctctcaactgttctactcagtatcatactagacattgtagtcagtgcaataagttaagaaaaagaaataaaaggcatacagatccaaaragaaaaaataaaactctgaccatctgcctagaaaatttcaaagactctgcaataaacctcccagaactaataaatgagtttagcaaagtcaaaagataca

SEQ ID NO: 14744 - DNA, 201 bp, Homo sapiens
tagacattgtagtcagtgcaataagttaagaaaaagaaataaaaggcatacagatccaaagagaaaaaataaaactctgaccatctgcctagaaaatttcaaagactctgcaataaacctcccagaactaataaatgagtttagcaaagtcaaaagatacaaaagccaacatataaaaatcaattctatttctaacaatga

SEQ ID NO: 14745 - DNA, 201 bp, Homo sapiens
atctgtgttcattgattgcaagactcaatagtatgaagatgttaaatcttctaatttgatctagattcaacacaattccaattccaatcccaggaagctatattttttttttaggtatttacaagctgattctaattttttttatggaaatacagagaaaccagaggagccaaaacaattctgaaataagaacaaattgga

SEQ ID NO: 14746 - DNA, 201 bp, Homo sapiens
gtaaagctacagtaaacaagatagggcagtgttaatgaaaggctgggtgcatagatcagtggaacagaatagagtccagaaataaacccacacaaatatamccaagtgatttttggcaaaagagcaaaggcaattcactggagaaagggtagtcctttcagcagatggtgctagaacaattagctgtctatatgcaaacaa

SEQ ID NO: 14747 - DNA, 201 bp, Homo sapiens
gctgaagcaggagaattgcttgaacctgggggtggagattgcagtgagctgagatcatgccactacactccagcctgggcaatagagcgagagttcatctaaaaaaaaacagagttcctacctcctagagctgggtagacagagatggcacatatagatcacctgctgcttggtacatacttagcacaggggtgctgtcca

SEQ ID NO: 14748 - DNA, 201 bp, Homo sapiens
agttaggggtgctaggaaggtggcagagcaaagcgtatgacctttggagggccttaaaaggccaggtactagatccctgtgtaatccctgggaagctactkcacctctctgagcctcagttgttcatgtattaaatgatgttattaatgtccgccacagggctaccggtaggatgaaataaaagtgtatctaatatgttga

SEQ ID NO: 14749 - DNA, 201 bp, Homo sapiens
ctgacccatcctgccccagtgctgtgccagctccaaggcttgagcagatctgagggcacctgggttcaaggcccaccctggtcccttgtcacaggcagctytgcatatttgggaggaaaccacatggtggttaatgcatgttcaggctccggagccagactgccaacttgctaggtatgtggccccggccaagttgcttca

SEQ ID NO: 14750 - DNA, 201 bp, Homo sapiens
atatttgggaggaaaccacatggtggttaatgcatgttcaggctccggagccagactgccaacttgctaggtatgtggccccggccaagttgcttcacctstctgtgcctcagtttcctcatctagaaaatggggaaaccagtcacgctcacttccttgggctgctgtgagggatgaatgggtccatttgtgtagagtgcg

SEQ ID NO: 14751 - DNA, 201 bp, Homo sapiens
acatggtggttaatgcatgttcaggctccggagccagactgccaacttgctaggtatgtggccccggccaagttgcttcacctctctgtgcctcagtttcytcatctagaaaatggggaaaccagtcacgctcacttccttgggctgctgtgagggatgaatgggtccatttgtgtagagtgcgtagggtcgtggctggca

SEQ ID NO: 14752 - DNA, 201 bp, Homo sapiens
tccttgggctgctgtgagggatgaatgggtccatttgtgtagagtgcgtagggtcgtggctggcacagggaagcactaggaaacagtggctgtcgttatcstcacagtggcatctcagccaagccagcaggtgcgacctggaaagcaggtgtggccttcctcaggggagatgatgactgtgggctgctgtgcaggctggga

SEQ ID NO: 14753 - DNA, 201 bp, Homo sapiens
gaacatccttgtatgtgccatcttggggcattcatgcatctaattccctaaactagagaaaaatggaattcctgaagccataggcagtgagtctttattcvcaatcacatttccttgccagtgtcccctggggcatgccttatcccttttgtagttcctgtatctacctgcagggggaagcactatgccatctgggcctac

SEQ ID NO: 14754 - DNA, 201 bp, Homo sapiens
gtcccagccctgatggcttccctttgccctgagtctgcagcgggtcccttttgtgcttccttcccccatcaggtggcctctctcctcctgggtcactcccrgggtgacaaggttaccccttcccagtgttttttattcctgtggcgctcaccccaaagtattaaaagtagctttgtaatttgaaaaaaaaaaaagagctta

SEQ ID NO: 14755 - DNA, 201 bp, Homo sapiens
tcctcctgggtcactcccagggtgacaaggttaccccttcccagtgttttttattcctgtggcgctcaccccaaagtattaaaagtagctttgtaatttgaaaaaaaaaaaagagcttaacttcactatttaagttatgtaaattaaaacaggatacctttttgtctaacagattgataaaaatggaaaagaaatataata

SEQ ID NO: 14756 - DNA, 201 bp, Homo sapiens
aagcagatcacttgagcccaggagttcaaagctgcagagagctgttatcgcgccactgcactccagcctggccaacagaataagaccctatcttttttttaaaaaaaaaaaaaaagtgggggtgggggggtggggagaaaaaacgttttatttaacagcctagacaaattcctctattccatttgtttcctatgaccaaac

SEQ ID NO: 14757 - DNA, 201 bp, Homo sapiens
acagaggtcatgtcctattcatctctgatgtccaagtatcagccacaggcctgtgtgtggtaagcactgctcagagaatgtatggatgcatgtctctactygacgatggaacaggctgaaatacaccactctcccttgatatgtaggtctcagaccgccccccgaccttagtaaggtgaagtctctgggtggttcttaaaa

SEQ ID NO: 14758 - DNA, 201 bp, Homo sapiens
ccaactttccttattctgccttaaatgaaagcaatttcaaaagaacaagaagacatcagattagacattctaaatgcctcctgtgtagcacataccaagcaaatcacagactgtccaagctggaagggatcttggacagctcctggcccatccaccctggaacccagagagggtcagtgacttgcccaaggtcacacagga

SEQ ID NO: 14759 - DNA, 201 bp, Homo sapiens
aactttgctcgacccactctttaaaaagctgcaactttcctttattcataaattattaggtaacttgattcctaaaatttaatttaatttaatttttattacacacacacacacacacacacacacacacacacactgaatctctctgtttgggaagctcagaggatctcctccccctcaccccaccttccatcgcaggaa

SEQ ID NO: 14760 - DNA, 201 bp, Homo sapiens
actttgctcgacccactctttaaaaagctgcaactttcctttattcataaattattaggtaacttgattcctaaaatttaatttaatttaatttttattacacacacacacacacacacacacacacacacacactgaatctctctgtttgggaagctcagaggatctcctccccctcaccccaccttccatcgcaggaaa

SEQ ID NO: 14761 - DNA, 201 bp, Homo sapiens
ctttgctcgacccactctttaaaaagctgcaactttcctttattcataaattattaggtaacttgattcctaaaatttaatttaatttaatttttattacacacacacacacacacacacacacacacacacactgaatctctctgtttgggaagctcagaggatctcctccccctcaccccaccttccatcgcaggaaaa

SEQ ID NO: 14762 - DNA, 201 bp, Homo sapiens
tttgctcgacccactctttaaaaagctgcaactttcctttattcataaattattaggtaacttgattcctaaaatttaatttaatttaatttttattacacacacacacacacacacacacacacacacacactgaatctctctgtttgggaagctcagaggatctcctccccctcaccccaccttccatcgcaggaaaaa

SEQ ID NO: 14763 - DNA, 201 bp, Homo sapiens
ttgctcgacccactctttaaaaagctgcaactttcctttattcataaattattaggtaacttgattcctaaaatttaatttaatttaatttttattacacmcacacacacacacacacacacacacacacactgaatctctctgtttgggaagctcagaggatctcctccccctcaccccaccttccatcgcaggaaaaaa

SEQ ID NO: 14764 - DNA, 201 bp, Homo sapiens
actatggtcagtactgcagatggacttggttaaataatccctgcttattaaccttggaggaatcgaataatctccctgagcctcagttttttcatctattaaaaaaaaaaagagcttggccgggtgtgctggctcacgcccgtaatcccagcacttcgggaagccaaggcgggtggatcacctgagattgggagttcgaga

SEQ ID NO: 14765 - DNA, 201 bp, Homo sapiens
gagaaacctcgtctctactaaaaatacaaaaattagccgggtatagtggcacgtgcctgtaatcccagctactcaggaggccgaggcaggagaatcacttraaccaggaagtcagaggttgtagtgagcggagatcacgccactgcactccagcctggcgacagagtgagactactccatctccccacaaaaaaaagagct

SEQ ID NO: 14766 - DNA, 201 bp, Homo sapiens
tcccagctactcaggaggccgaggcaggagaatcacttaaaccaggaagtcagaggttgtagtgagcggagatcacgccactgcactccagcctggcgacrgagtgagactactccatctccccacaaaaaaaagagcttaaagggggtggatggaaggttaatgaagagaacacacgtaaagcacattgcacagtggcta

SEQ ID NO: 14767 - DNA, 201 bp, Homo sapiens
gtgtgtctgaggaagattttttaaaaaatagccaattaggctacctttggccatctgtcttaaagctctaatcttagcagttaatggtgtctatccttatycctcctttgtaactgttgttgaagcctttcatgcaactagaccaagatgtttaaggaaaaaaaatcaatcttctccaccccaaaaatgtattaatgacat

SEQ ID NO: 14768 - DNA, 201 bp, Homo sapiens
accaggctgcatgcagtcttagtagaaaaagaaacactttcttctgcaaacatcagagaccgtctgaaatgctgtgctgttgtttaatttcatagaggacrgtttgggagggcagatgatagaaaaagaaatcgttggagtttcttccatccatcttacataaccaccttagtatcagtttgcactgtgtcccctcaggca

SEQ ID NO: 14769 - DNA, 201 bp, Homo sapiens
tgatagaaaaagaaatcgttggagtttcttccatccatcttacataaccaccttagtatcagtttgcactgtgtcccctcaggcaagaggcagtgtgtaastgtgctcaaacctccagaatcctatttcatgtatgaagatgtttgtcattcagaaataagctcttggaaataaatgcttcagcttctgagggctgcactg

SEQ ID NO: 14770 - DNA, 201 bp, Homo sapiens
accatcctcattttacagatcctaaaactgagctcagagaggtgaaaccacttcctgaggtctcacagcaagaaagtggcagagctgggatttgaatggaygggattctcactgcagagctcaggaaacctgatgacctggaaagacagtcagcaccaataagaacccctggtccccaccaggactgggtgcagacatacg

SEQ ID NO: 14771 - DNA, 201 bp, Homo sapiens
agaaactcattcctgctgggctcactggcacccaacttgctaaaccacctccccacgtggcagctccatctctcatctctgctgggcaggaatcttctccrtttccacctgctgctctgagctggagctggctgcactcttcatcgcgcaagggctttgtttccttaagtatgcccctcaatagctttcgctttcgttgcg

SEQ ID NO: 14772 - DNA, 201 bp, Homo sapiens
atcaggaactgaactggccaacacgttgaccctggccttcccagcctacagaaatgtgagaaaacagagtcctattgtttaagccaccttgtctttggtaytttagtcagcctaagctgactaagacacatggagagaacacttgcaatatataccacagataaagggccagttagctctaatatttaaggaattcttaag

SEQ ID NO: 14773 - DNA, 201 bp, Homo sapiens
aaatgatctcaccttttcctgtggccaagctgcaagtgagctctgctctaatgggcgtgcccagagaaattaagtctttttggcagcagcctgccttggcrcaattaccaccctaccaagggccgctgtaaagaccaggccagaggactaagcatctcgaatttctgcaattgattaaacactcattcagagaggccattt

SEQ ID NO: 14774 - DNA, 201 bp, Homo sapiens
gatatttaatcaagttaggggtgctaggaaggtggcagagcaaagcgtatgacctttggagggccttaaaaggccaggtactagatccctgtgtaatcccygggaagctactgcacctctctgagcctcagttgttcatgtattaaatgatgttattaatgtccgccacagggctaccggtaggatgaaataaaagtgtat

SEQ ID NO: 14775 - DNA, 201 bp, Homo sapiens
attctcacttcctctttcacataattagttttgttctcttttaaatttcaaccgaaatgcttcctcctccaggaagtcttcccagatatccaagaccaggkttggtctcccctggcatacactcaattggttccatgtgctttgccatcttggtattattacaattgtaactaaatacacagttgtgtaatttgtttttgt

SEQ ID NO: 14776 - DNA, 201 bp, Homo sapiens
tcaccactccacatcactgctgctgtggcatccctggcatcaggatttagcccaaacacatggtgctctttaatttggtgatgggtgtcctgggtccagcrtccccgtgagcagtcttgtctctctgagcaagttcccgggctaccctgcagcgtgctaagtgagggctttgaaattcagactgcctaagttcaaagtctg

SEQ ID NO: 14777 - DNA, 201 bp, Homo sapiens
cactccacatcactgctgctgtggcatccctggcatcaggatttagcccaaacacatggtgctctttaatttggtgatgggtgtcctgggtccagcgtccycgtgagcagtcttgtctctctgagcaagttcccgggctaccctgcagcgtgctaagtgagggctttgaaattcagactgcctaagttcaaagtctgctct

SEQ ID NO: 14778 - DNA, 201 bp, Homo sapiens
ctttaatttggtgatgggtgtcctgggtccagcgtccccgtgagcagtcttgtctctctgagcaagttcccgggctaccctgcagcgtgctaagtgagggytttgaaattcagactgcctaagttcaaagtctgctctgcaacccaccagttgtgtggcctgggacaagtcagtttaacctatgtctcagtttccccaact

SEQ ID NO: 14779 - DNA, 201 bp, Homo sapiens
gggagtctggaaggtgggtacaagtagacagggtctatgtctaccagcccccaataaaaactgtgggtgctctctaatgagctcccctgatagacaacatyccacacctttgtcaccatttgatgctggaggaattagtgtgttctgtggaactcacagggaggggacccgtggaagcctgtgcctggtctcctctggact

SEQ ID NO: 14780 - DNA, 201 bp, Homo sapiens
ctctaattaaatgaaattaccggcaacagtttttaacttctggaatatttcaattctaatatgctccttgaatccacccatgggggtgctgaggccataargaagccgtttaatttttattgagatgaaacacacacatatatgcacatatcccagcagtgccccgctaccctgtgttctgctaccgcataaccaggagat

SEQ ID NO: 14781 - DNA, 201 bp, Homo sapiens
gcataccaacaagctacctgctgccgctcacctccaatagaagctgctgtgatctctgccgcgtcctgcatattgacgtttcagcaaagaacacaaaacayattaaataaatgttacagtcttatcgacaggaaaaggagagctgagaaagagtttccagaggcatggcacttggcccagagccccaagccatgtggcctc

SEQ ID NO: 14782 - DNA, 201 bp, Homo sapiens
ttatgctcagcctgctttcctcctgggagtctggaaggtgggtacaagtagacagggtctatgtctaccagcccccaataaaaactgtgggtgctctctartgagctcccctgatagacaacatcccacacctttgtcaccatttgatgctggaggaattagtgtgttctgtggaactcacagggaggggacccgtggaag

SEQ ID NO: 14783 - DNA, 201 bp, Homo sapiens
ccgtgccacatggccccacaaaacccacaatagcttttgtgcctcactttcgttgggagtaaaaagggagtcctagcccaggattgtccttctccaaatayctaaagtcagcagcatctcaatgccacatgctttcaccatgcccccagcaatatctgcaattctctttctccctttttatgtctctgagctccccggttg

SEQ ID NO: 14784 - DNA, 201 bp, Homo sapiens
ctagcccaggattgtccttctccaaatatctaaagtcagcagcatctcaatgccacatgctttcaccatgcccccagcaatatctgcaattctctttctcyctttttatgtctctgagctccccggttgagaagccagggcccctgagaacttcggcagccctggctggtctccctgtaaagagcgtgagacaagacccaa

SEQ ID NO: 14785 - DNA, 201 bp, Homo sapiens
agaaagtgattcctattctctgcaccctttccgcttgccaggctttaacagtaaaaggccaatgtcagcagcacaaaatcttaaaaatcacccctaccctrgggcatgattagaagtctgcgtgagttcagagttaatatcagattcttcctcaggaatttaaaaaagaagtcagttttgaaagatttgtatttcaacctc

SEQ ID NO: 14786 - DNA, 201 bp, Homo sapiens
gcaataaatgcatttttgaaagccatgcttatccctgaattcacctgttgatcactcaccaaccaaatctagcaattctacctccagggtgtctctcagcrccaccctctacctttccacctaccttccccagggccctgcctctggcttccactgacctacacacattgaccacacccatgaaactcatattttaacccc

SEQ ID NO: 14787 - DNA, 201 bp, Homo sapiens
ccggagacatttcccatttatgtaaaggttgcatttgacaaggccagggcatgtagggaggctgggtacatgcagcccagctctacaggctgcagcagggmaggagcatttgatttttacaatcaaagggaagacaaagaggtaaaaacacaaatcagttttgtttttacaggaatcacactctgggaaatggtgtacatt

SEQ ID NO: 14788 - DNA, 201 bp, Homo sapiens
ccaccaaggacctgacatcaaagctagcatgatcctgccaaaatgcataaactaatccaatcatagcaaccatcagatatcccaaatagagaaacattctrcaaaataatgagccagaatgtttcaaaaatatcaatgtcataggaagataaaggctgaggaactgttccaaattaaatgaaactaaacaatcataaaaac

SEQ ID NO: 14789 - DNA, 201 bp, Homo sapiens
agagagggcatcacttgcccaaggtcacacaacaaggaggtggtggagctgggatggggatctggctccagaacctcccttgggcaggggatatgatgtgwaaagaacattcattctttacctcatgtagccatgatctgggagaagagacattcattaaacaagtgctcccaatttatagatgggttaagagtttcagcc

SEQ ID NO: 14790 - DNA, 201 bp, Homo sapiens
tggtggacaccgactgccttcctcggcctggggcgctggcctctgcctcgccagcatccacaccactgtcctcgcttagagtctgcccgctgtccgagagstgggagagcgtagaggctgctggagaggggaaaaggaagagagaagcagcttatatagctggggtcagggagggctgcctggaggcagtgacggagatgg

SEQ ID NO: 14791 - DNA, 201 bp, Homo sapiens
acctgtaatcccagcactttgggaggctgaggtgggtggatctcctgatgtcaggagttcgagaccagcctggctaacatggcaaaaccccgtctctaccmaaaaatacaaaaattagctggttatggtggtaggcacctgtaatcccagctactcaagaggctgaagcaggagaactgcttgaactggggaggtggaggt

SEQ ID NO: 14792 - DNA, 201 bp, Homo sapiens
ctctcctgtctcttcttcctccagagcctgtgttcaaaccaaagtgctaggtaggactggcttcagggtctccacagggccctccgcagcatgtgagttgrttttgagtggctcccatttttctgtgtccagctctctcccttttcctctacttgttggaaagcttccccaggtctaggagccctgtcagaagagctgtct

SEQ ID NO: 14793 - DNA, 201 bp, Homo sapiens
accatggaatgcccttcattttaaggcagaggaaagactcctccatcatccacagcccactgagtgactggctcatgttcagacactttgagaagagcacrgcggggcttcaataagggcaggataccgatttccctgaaattggccaaccaccagtaagcagagaattcaattcccttaggtctggggcaggcgcaggag

SEQ ID NO: 14794 - DNA, 201 bp, Homo sapiens
agcaccaccctctacctttccacctaccttccccagggccctgcctctggcttccactgacctacacacattgaccacacccatgaaactcatattttaaycccattttacagatgaggaagccgaggacgggaagtagagtcattaagagctgggatctggccttcattctaccagccagcaaggcccctgcacgaacca

SEQ ID NO: 14795 - DNA, 201 bp, Homo sapiens
atgaagggaactggcaggaagaacctgtggcggaatggcagtagcttcgagctccctcgccagaagttgttaggagagaaggctgccaacaacctgatccygaggctgagctgggagacgggaatccatcctctcaggccgcgcgtgcacctgtaccagccacgctgggaagggcccgaaagaagccgatttcagagttgc

SEQ ID NO: 14796 - DNA, 201 bp, Homo sapiens
ccagccacgctgggaagggcccgaaagaagccgatttcagagttgccttcagcaccctcccaagcctgtgttaaaatggatcttgcggcttcaagggaggwccctgttggctacagcattatcacaaggaaaattcaaattctattaaagagttttattgcaattatgaatctttaatagttttccatgtcaggtgtaaaa

SEQ ID NO: 14797 - DNA, 201 bp, Homo sapiens
ttactctattcaccacacaggaagcctcaatgaaggcctgctctaacccagccatcaatcaaaactgaggccagaaaggggaaagaacttgcccaaggtcrtactctgagtcaaggtcaaacctgagttcttcccaaaggaaaatctggcttccaaagtaaacagagaaattacagaggtcaaacacagaaagaataacaa

SEQ ID NO: 14798 - DNA, 201 bp, Homo sapiens
gcagatatcactaatccccctcgcccagggcaccgtgcagcactcactccccacagtttgagatcgtactagactacagacagagagttcaaagtcagtgmgctgcacccccttgaatggcacatgggaaacacctgacaaatgcctgacggaatccatgaatgaatgaataaacaattaaataaatggatgagcaggcat

SEQ ID NO: 14799 - DNA, 201 bp, Homo sapiens
atgagtattctacactgctggaccaatcaccacaaactcagtggtttaaaacaacacgaatttattatcttacagttctggggtcagaaatctaacatagrtctcactgggctaaaatcaagatgtcagcaggacagagttcctttctggagagtccgggggacaatccaattccttgccctttccaagctaccagaggcc

SEQ ID NO: 14800 - DNA, 201 bp, Homo sapiens
gcctcaaatcatggaggaaggtgaaaggcacgtcttacatggcagcaggcaagagagaaatgagagccaagcaaaaggggaaaccccttataaaatcatgrgcactcatgagacttactaccacgagagcagtatggggtttccccccaccacccggttcaattatctcccactgggtccctcccacaggacacaggaatt

SEQ ID NO: 14801 - DNA, 201 bp, Homo sapiens
tgaggcactgtgactttgtgctcagctgtccctgttggcatcagcacagaggtaaggcatgtggccttggggagccctgcctttgaatcacagcttctctrccaactaaaaatatgttttggggcaagctgcttaatctcattgagtctcgggttctttatcagtgaaataggcatgatgaaactcaggagatcctcctgg

SEQ ID NO: 14802 - DNA, 201 bp, Homo sapiens
ggaacacttctttccacttcagggacttggcatttgctgttctttctgcctggaattctcacttcctctttcacataattagttttgttctcttttaaatktcaaccgaaatgcttcctcctccaggaagtcttcccagatatccaagaccagggttggtctcccctggcatacactcaattggttccatgtgctttgcca

SEQ ID NO: 14803 - DNA, 201 bp, Homo sapiens
tcagtatgtgacatagtaactgctcaataaaagggtaagaggataataaaagacactactcatcagtaatcagagagagagggcgagatgctcagtgctckcaggccaagacctaatgtgttgtctctctggaatgctccctctctccctttctcttaatgtggatttaatcagagggtactcaccaccaacaacgttacg

SEQ ID NO: 14804 - DNA, 201 bp, Homo sapiens
ggtgagggtgccatgagccaggctaagaggctgggctatgagcaggacagtgacaggctccaaagtggactgcaggaagactcctggaaacgggaagcagsagaggggtgactttgtagagatcccccatgagaagtggtggtcttacgatggtggtgatgtaggaggaaggtggggttcagatcagggacagaacagaga

SEQ ID NO: 14805 - DNA, 201 bp, Homo sapiens
ctgttgtgaggatgaggatgcgtgggctcccaacttccacccttgctcctgccatctaccctccatccagtagcctggacagtccggctggaacctcataygcacctggtccctcctctgctcaaagctctgccatggcagccatctcactcagaggaaagtccccagactcggcctggttgcccatgcctgctgcctcac

SEQ ID NO: 14806 - DNA, 201 bp, Homo sapiens
gtaagcagaaccaaggtttgaacccaggcagcctgggacccaaggtcttaccatccctgccacactgatgctatcccacttagccgccccccatgacaaaktgattctagtttatgagagctatagaggctgcgggttagaacaacatgggaagccatacagtgagcactctgcaccctgccccgttcacttctgaggatt

SEQ ID NO: 14807 - DNA, 201 bp, Homo sapiens
gacactcctgaaaagggctataaaactataaccagctccaggggatggcataaggattttcaggggtaacttggctacatgtgtgatttttatgctactaytgccctgagaacccacttcctgagaggtatacttcctctgtggaggttatggttacgagtccaagagtctggccgtggctttttggactatcagaagatg

SEQ ID NO: 14808 - DNA, 201 bp, Homo sapiens
acagacagcaccagcttcttggagcccttcagagcctagggagagagggatacaaaggttagaggaagggaggtgccgggggtgtggaggaacaccctccmctggcccagaccttggtttttctcaggagccccacatggaagaagaggccagccctgaagtccctttccttctctagccctcgattttgtcctgtgaaaa

SEQ ID NO: 14809 - DNA, 201 bp, Homo sapiens
attctgagtgtggaacaccatctttattgtacatttcccagtcttcagatggaaccaccgtgaggagaggcaagcccaaaactctacagcctggggtggargctgaggtctgccatattgcttcaccacaagacgcttgcagctgagatgaagacattgacccaaggagacactcaccaagcactaggattaacaataaac

SEQ ID NO: 14810 - DNA, 201 bp, Homo sapiens
tgcgggaagaggcaagtccctgacatttgagcctctctcagcagaggaagggtgagccaggaggcacccaggccctcaattctacagctaaatcccagtcyccagtggagggataacgaggatggcgtctctccaaaattctgcttttataaaagatttttgtgaagatgcacagggtaagatttacagtattcttttagc

SEQ ID NO: 14811 - DNA, 201 bp, Homo sapiens
gggtgagccaggaggcacccaggccctcaattctacagctaaatcccagtctccagtggagggataacgaggatggcgtctctccaaaattctgcttttawaaaagatttttgtgaagatgcacagggtaagatttacagtattcttttagcattccccagggctcccctggcagaacagtcaggaaaatcaaatccctgt

SEQ ID NO: 14812 - DNA, 201 bp, Homo sapiens
gacaggctgcagcctggtgagaaacaaggaggcatcacccagcacacatcaggtcctcatgacacttatgcctggtgaggaacaaggcattgcctggcacrcagtaggtcctcatgacacttgagcctcgtgagagacaaggcattgcctggtacacaataggttttcatgacacacgcctggtgagagacaaggcatcgt

SEQ ID NO: 14813 - DNA, 201 bp, Homo sapiens
ggcacacagtaggtcctcatgacacttgagcctcgtgagagacaaggcattgcctggtacacaataggttttcatgacacacgcctggtgagagacaaggyatcgtgtggcacacagtaggtccttatgacacttgagcctggtgagggatatagcattgtcctgcgcacagtaggtatttgtgaaacttgtgcatagtga

SEQ ID NO: 14814 - DNA, 201 bp, Homo sapiens
gttcttctgttttctctcctgcaaaatgaagatcaccattctcctttctctttacttagaggagccctattagcacaatgcctatcactgaggaattcaaygagctacggctgaaaaggaaaattgcaagatctggggagagcccaccgcatgcagggatggtcattagagtgctgtgttcccatacctgttatcacgtgt

SEQ ID NO: 14815 - DNA, 201 bp, Homo sapiens
cagcactttgggggacagaggcaggaggattacttgaggccaggagttcaagagtagcctggacaacatggtgagacgccacaaaaaaaattttttttttwaaatttaaaattatccaggcataatggtgtgcacctgcagtcctagctactcaggaggctgagttgggaggtttgcttgagcccaaaagatcgagactac

SEQ ID NO: 14816 - DNA, 201 bp, Homo sapiens
ctggggcatgccttatcccttttgtagttcctgtatctacctgcagggggaagcactatgccatctgggcctacagaggacctgaattcccctgacaatgyggacagggctgggtggaggcctcgcaatgtccttctcccaagggagtgctcactctggtggagagatccacactccttcgtgctttcttccacagtttcc

SEQ ID NO: 14817 - DNA, 201 bp, Homo sapiens
caggtgctgtgtccagccacatggactggaaagtcccttcccatttagccctgctttgagggaggacagaaattggtgatgcggactctgccccagtagcwtattttaatgtcatgagaaagtaaaaccctaattagcactctgtcttccaagctccttccatctgtaccattttcatctgtgttaattacctcttacagg

SEQ ID NO: 14818 - DNA, 201 bp, Homo sapiens
acataaggataaaggccaggggagatggcagagaaatgtatgatgtccagttagaaggatgggaacgtgggtgtcttctccccttttctggttttctttartgctatttagatatgcctttaatttgggcctcacgaagtaggtttttaaaaaccaacggctggataggagagtatttaaggaaagaagaacatttaaaga

SEQ ID NO: 14819 - DNA, 201 bp, Homo sapiens
cagattccagaaagatattgattcctctttaatgcaattcttcaattatcctcaaagcctggcttttagtctgttataatttaagtaaattgctttataartgttcttttaagttttgtctgtttattctttttttttctttaaggaagaacaagattctcagagtcataaatatattcactcaagatgagccccaatggg

SEQ ID NO: 14820 - DNA, 201 bp, Homo sapiens
ccagaagagtatgaaaaagcagagcgcgcctcggttaagggaaagcaccaagatgacaggctttttgccgccacccgcaagcagagggacttggagatcaygcagcagaaggagaaaaaggcaaacgagaagcagcaggaacccaagtagctttgtgcttcgtgtccaaccctcccgccctttgcctgagtgcctggagcc

SEQ ID NO: 14821 - DNA, 201 bp, Homo sapiens
ctttttgccgccacccgcaagcagagggacttggagatcatgcagcagaaggagaaaaaggcaaacgagaagcagcaggaacccaagtagctttgtgcttygtgtccaaccctcccgccctttgcctgagtgcctggagccagtcccaccatgcccacgtctcctcctgcagggcccacaagtcccagccctgatggcttc

SEQ ID NO: 14822 - DNA, 201 bp, Homo sapiens
ggtgggaggtagttatgcctatttcacagctccaaagactgaggttcagagatgtcacgtgaactgcccacggccacaaagccagcttggtggtaaagcayacactagagccagtggcttttttcagtgtttttgtctagcacccacaacgctgccatacacagacttccatcagatctcactctcaggagctggggaatt

SEQ ID NO: 14823 - DNA, 201 bp, Homo sapiens
gaggctgactacaaaatccttgggctggggtccaagcaaggaggccacttggttcctaatcccaatggggaccttaagctccccagttccatctccttgarcatgaccctcctcgcctgcctgcctcccctggggaaggttaaagggaacaggagggacaaagcacccagcacatagtaggtaatcgttaatgtcagtctc

SEQ ID NO: 14824 - DNA, 201 bp, Homo sapiens
atgtcagtctcccctgttcccaacaggcttccaataaagtaaagtgcaagtgcaatgtaaattacatactccaggtgacaatgatgtgtcaatgtaggttyatcaattgttgataatgggggcggctagcatgtgtccactatatgggaaatctctgtatcttctgttcaattttgctgtgaaccgaaaactgctttaata

SEQ ID NO: 14825 - DNA, 201 bp, Homo sapiens
atcaccagttggagcctaatcccctatggacgcctgcttcggtgcaaagccctttgcaggatggaggggggattatgactctgaggagactgtacatgtgmttcaagcttgagcagtcaggcacatgagcgaggggctgcaggcactgacaggtgcaggcaggctgtgtaccgctggtgcggctgccggcaggcagagttg

SEQ ID NO: 14826 - DNA, 201 bp, Homo sapiens
caaagccctttgcaggatggaggggggattatgactctgaggagactgtacatgtgattcaagcttgagcagtcaggcacatgagcgaggggctgcaggcrctgacaggtgcaggcaggctgtgtaccgctggtgcggctgccggcaggcagagttggaaagcagcaacacacggacaatccaattggtcggggggttaaa

SEQ ID NO: 14827 - DNA, 201 bp, Homo sapiens
atgactctgaggagactgtacatgtgattcaagcttgagcagtcaggcacatgagcgaggggctgcaggcactgacaggtgcaggcaggctgtgtaccgcyggtgcggctgccggcaggcagagttggaaagcagcaacacacggacaatccaattggtcggggggttaaagaatcacacttatctttgcagctccaacca

SEQ ID NO: 14828 - DNA, 201 bp, Homo sapiens
gcagcaacacacggacaatccaattggtcggggggttaaagaatcacacttatctttgcagctccaaccaactgatgaattgatggcaagtaataaacaamgctgggtttgtcagcagaggagaatgacaggaaaacaagacactagcgctggtgtggttctatatctctttcatgtccagcttcaagtcaggaggcaata

SEQ ID NO: 14829 - DNA, 201 bp, Homo sapiens
aagctgggtttgtcagcagaggagaatgacaggaaaacaagacactagcgctggtgtggttctatatctctttcatgtccagcttcaagtcaggaggcaakaattttctataaaaataccgattttttttaagggcattctcttccatcctacaaaatgcttctttgatttaaagagtaaataaccagatgaaagaggatt

SEQ ID NO: 14830 - DNA, 201 bp, Homo sapiens
agacggcgggggtcgcgaacctggaatccgggggacgcggagacgtcggcgggttcctgagagacacaagagttggctgctggagcccggaggtggcggasactgctgctggagtccggggggcgcggggtcagcagctacattctggagggcacggagacgacgggtggctggagtttgggggcgccgcaaagctgacct

SEQ ID NO: 14831 - DNA, 201 bp, Homo sapiens
aaagaaaagatacatcaaataaatatttagggaatgggtgggtgcagcaacaaccccttccccaaatgcacacgcgcacacacacatgcaaaatccacacrttctccaaaccccttttctatttaccttgaatgctttgggcaggaataatggagagaggggagggaaagaccccactgccatgaccagcatcccttcatt

SEQ ID NO: 14832 - DNA, 201 bp, Homo sapiens
ctggatctgatttcctttgattgactgtgtctgctttgaggggaaatggctgcagaatgagccacatttaacctgggatcaataaccacacagcatgatcygaggaattcaggctaaatggaaactggctccatttggggccagtgtctggggcatctcggtcatcgatagccagccacctgatgtcatcttgcccaactg

SEQ ID NO: 14833 - DNA, 201 bp, Homo sapiens
ggtcccatgatgcttcaggggcatagtcaggcaggggcaactgcccccatttccccacaaagttgaggtttacatgcaaaccttggtcctgacctgttaastgcacactgcctcacaggaatctgctgctgacagcccctgtgatgcaagcgcggtatgtggtggttggggggattctttcaaaagggcgagggtgattgg

SEQ ID NO: 14834 - DNA, 201 bp, Homo sapiens
ctctctctctttttttttttttttttttgagacagattctcactctgtcatctaggctggagtgcagtggtgcaatcttggctcactgcaacctctgcctyctgggttcaagtggtcctcccacctcagccttctgagtagctgggactacaggtgcccaccacacctggctaattatcgtatctttagtagaaatggggc

SEQ ID NO: 14835 - DNA, 201 bp, Homo sapiens
cctcaccagggtcacaaccctccctggaggcagctctgtggctagtggctgatggcggtgggtaaaagccagccccagcctcaattctggacacctctgcrggccatcccagctccagagctccctgtgggacctgccgagatccgtgctgagaaggcacggcagccctgccctgtgtctctcactcctttgccagtgttg

SEQ ID NO: 14836 - DNA, 201 bp, Homo sapiens
ttgaatgctttgggcaggaataatggagagaggggagggaaagaccccactgccatgaccagcatcccttcattctgcctgcctccttgaaggaaacaggsgagtccccactgctctaaagaaaagacatttgtccctgctaaagggccttcaggagacagtcatttactttggggcgaggctgggatccgtattcccaga

SEQ ID NO: 14837 - DNA, 201 bp, Homo sapiens
ttttcaaaaatcaaacatttcaacataattgcaaatagtccatggcttaccttatctggacctgtcactgctgattttgcaaatgggtttcaagagagggktggaagccccaatggatataggatcaaatcctcactgaactgcttcaggtaacaatggatgcttgatttatcagaaagagaagtggaaaaaactttgctc

SEQ ID NO: 14838 - DNA, 201 bp, Homo sapiens
aaagcaggtgtggccttcctcaggggagatgatgactgtgggctgctgtgcaggctgggaccaccatgtggacgtgagccaggctggagttccatctacasgctttcgagcctggagtctgtgctaggccttgtgctgggtcactccagaagctcaggagtcaccgggtggtaagagaatgctgagaggaaagaacaaggc

SEQ ID NO: 14839 - DNA, 201 bp, Homo sapiens
ctcagaattcaatttcaatataaatactgttcctatcaaaggcaccacacacacatacacacacacacacacgcacacacacgtacacacacacacacgcrcacacacgcgtgcacacacacacacacactttccaagatcacttctgattcctctacctttttaatgaagtgcttttcaggttaactcactccattactt

SEQ ID NO: 14840 - DNA, 201 bp, Homo sapiens
gctgggtcactccagaagctcaggagtcaccgggtggtaagagaatgctgagaggaaagaacaaggccacccaggacgggacactgctccccctccaggascaaggcgctcctcctcagggcagcgagtctctcctcaagaactgccctaggccaagggagcacctcaccagggtcacaaccctccctggaggcagctctg

SEQ ID NO: 14841 - DNA, 201 bp, Homo sapiens
tttttttgagacagattctcactctgtcatctaggctggagtgcagtggtgcaatcttggctcactgcaacctctgccttctgggttcaagtggtcctccyacctcagccttctgagtagctgggactacaggtgcccaccacacctggctaattatcgtatctttagtagaaatggggctttcagcaagttgcccaggct

SEQ ID NO: 14842 - DNA, 201 bp, Homo sapiens
ccttctaatccaatggtggggtcctaatccaaaagggttggtgccctttataagaagaacaagagacacctgagtcctctcttggccatgtgacaacacgrtaagaaggcaagccatgaagatagcccctatcaggaactgaactggccaacacgttgaccctggccttcccagcctacagaaatgtgagaaaacagagtc

SEQ ID NO: 14843 - DNA, 201 bp, Homo sapiens
cggcagccctgccctgtgtctctcactcctttgccagtgttgaccccagggcactgccgccgctgtaacaaatcaccacagtcagagcctaagagcaacayagatttgttatctgacagtttgggaggttggaagtataaagtgtgccaaaaggaccacacttctcctagaggctccagaggagaacccgcttccttgcct

SEQ ID NO: 14844 - DNA, 201 bp, Homo sapiens
ggggctcagaattcaatttcaatataaatactgttcctatcaaaggcaccacacacacatacacacacacacacacgcacacacacgtacacacacacacrcgcacacacacgcgtgcacacacacacacacactttccaagatcacttctgattcctctacctttttaatgaagtgcttttcaggttaactcactccatt

SEQ ID NO: 14845 - DNA, 201 bp, Homo sapiens
aatgctttagacgggagaagagaaaaatagataaagcaaatgtggcgaaacatgaaaaactagtgaatctgggtgaagggctgatatggtttggatattcstcccctacaaatctcatgtgatccccagtgttgcaggtgggcctagtgggaggtgtctgggtcatgggggtggatccctcataaacggcttggtgccctc

SEQ ID NO: 14846 - DNA, 201 bp, Homo sapiens
agacaatcccccacgtcaagaccatcacatactcacatctgcaacatcccttttgctatataagggttccactcacaggttccagggaggaggaggtggayaccttcagacttgaggatacacttataatcctttttcaggcaaatctttgtctcagagtctattcccaggagcccagccaaaggcagagctccccagaaa

SEQ ID NO: 14847 - DNA, 201 bp, Homo sapiens
ttgatttttacaatcaaagggaagacaaagaggtaaaaacacaaatcagttttgtttttacaggaatcacactctgggaaatggtgtacatttaatccagyccctcattctgaaagaaagaaaactagggtgagaggtagaggaggggtgtcactggtccaaggcttcctgggcagttggggcaaagctggaccagaatcc

SEQ ID NO: 14848 - DNA, 201 bp, Homo sapiens
ccatctctactaaaaatacaaaaattagccaggtgtagtggcacacgcctgtgatcccagctactcaggaggctgaggcaggagaatcgcttgaacctggrcggcagatgttcccgtgagccgagatcgcgccactgcactccagcctggagacagagctagactccatctcaaaaaaaaaaagaaaaaaaaaatggtggt

SEQ ID NO: 14849 - DNA, 201 bp, Homo sapiens
ataaaaaggaccaggaattcgactggggatgtgaatgctttaaaaatacttttccttctccacgcccccacggggggaaactgaagtgtccatgttgtgcrccaatttccaaaacaccctctcagtatgacggccctgtagctgggaccattcccagtctctctggaaacccctatcctagcgcctctggcagagtctgca

SEQ ID NO: 14850 - DNA, 201 bp, Homo sapiens
aaaggaccaggaattcgactggggatgtgaatgctttaaaaatacttttccttctccacgcccccacggggggaaactgaagtgtccatgttgtgcaccartttccaaaacaccctctcagtatgacggccctgtagctgggaccattcccagtctctctggaaacccctatcctagcgcctctggcagagtctgcaggac

SEQ ID NO: 14851 - DNA, 201 bp, Homo sapiens
gggaaaggagctttggaagtgtcgtctaaggtcacgcagcaagcagactctggttctgcctgtgccagccccatcacactggggagagcccagctctgcgyctccctgctgtgcacccttgggccagtcgcgccccctctctggacctcattctcctccgcaggtgtaccaagagggaactggacttatttttgcagcccg

SEQ ID NO: 14852 - DNA, 201 bp, Homo sapiens
cctgaggcccgcccgcgacagcagggggcggcccggggggggcggggcctctgggagcgcaccaatcaccgaaaggccgccgccacggcccgcccccaggractcggacatagggagcgcaaaccctgctgcaggatgaaaatctcagacctgggaggctgtgtgtgcctactgcaatcagccccaccgcagacccggaga

SEQ ID NO: 14853 - DNA, 201 bp, Homo sapiens
ggcccggtctgcggagggtaaggcatttacgcaagatcgcacagagtggctcacgcctgtaatcccagcactttgggaggccgggcagatcacctgaggtsaggagttcgagactagcctggccaacatggtgaccgtccccccacccccaccagtctctactaaaactacaaaaattagctgggcgtggtggcgcatatc

SEQ ID NO: 14854 - DNA, 201 bp, Homo sapiens
cagaatggggaaaccgaggcttggtgcattgtgtaacctgcccagcattctccagcaagggagaagcagaccctgagactccattccccccaacccccacwttggcatcatgagtaaaaatgtcagggtcacaggtacatgtggccaggatggacctctgacaaccctccccccactctcccagtacttgaagctgcctta

SEQ ID NO: 14855 - DNA, 201 bp, Homo sapiens
ctgctaggtgggagggtcattccctgcagagggtcaacagcaccctgtcaggggatggcaggggtgccttctgaaacaccagctgcctcaggggaatccayggctcaggtctcaggtggtctgcccaggctggaaagagaacaaggacagccaagaacaggatctgggacaagagcatggaaccaactgtccctaacccac

SEQ ID NO: 14856 - DNA, 201 bp, Homo sapiens
ggcagaactctggacacagaactggacaaagcaggatttctcaaactcttccatcttccagacaaatattgaggacagaaggaataagcactggggccggractgaggccgtacagtagaccatgtttgcaaccttttcctccgagcccatcccatatgttttgctctgacacccgctgtcctaggctactggaacagctt

SEQ ID NO: 14857 - DNA, 201 bp, Homo sapiens
ggaatttatggcctctctctgtaggctttgtctaaagactgacaggcatcaaagtccagccctctggccttgagtggagacaactctaggcctagtgtacsccctgggatcctcctgggatcaggctgaagctgccttctgcagactttgcctgaaatctcaccttcgcttggcttcctccccttccctgtcctgcttccc

SEQ ID NO: 14858 - DNA, 201 bp, Homo sapiens
ctgcatggcccctgcctgagccgagtggtgggcacatgccctccagccaccagtcaacttcactatgtgtgtaacagcctggcccctgagtttgagacccyaacttaagaacacacactctggagtctggcaggtcaggtttgaattcccactgaccagctgtgcaagcctgggcaagtaacagagcctctctaagcctcc

SEQ ID NO: 14859 - DNA, 201 bp, Homo sapiens
gtatagaatggagcagtccagggaatagacttgtgctagactgcctggctccagggtgtgggttcttaacctagggtttcaaactcaggggcccggctgtyatacacatagtgaagcagcgtgggttgactggtgggctggagggcatgtgcccaccactcagctcaggcaggggccatgcagaggttcagaccaggtgtg

SEQ ID NO: 14860 - DNA, 201 bp, Homo sapiens
aacctagggtttcaaactcaggggcccggctgttatacacatagtgaagcagcgtgggttgactggtgggctggagggcatgtgcccaccactcagctcasgcaggggccatgcagaggttcagaccaggtgtggtggaatttctctttttctcttggtaagctagaaattactactttctctctctctctctcttttttt

SEQ ID NO: 14861 - DNA, 201 bp, Homo sapiens
cagctcaggcaggggccatgcagaggttcagaccaggtgtggtggaatttctctttttctcttggtaagctagaaattactactttctctctctctctctytttttttttttttttttttgagacagattctcactctgtcatctaggctggagtgcagtggtgcaatcttggctcactgcaacctctgccttctgggttc

SEQ ID NO: 14862 - DNA, 201 bp, Homo sapiens
ggagataataatagtaccaacctcatagggctactgggaggattaaatgagttaatactataggcaaggccctttgaacactggcacaaagtgcttattgytagtacggctgttagctcttattatccctgcatgtccagctcagtgccagctctagagacagcagtgatccatctgtgacagccctgggtcttctcacca

SEQ ID NO: 14863 - DNA, 201 bp, Homo sapiens
acaaccttccagtcaccatcctaaaggctttacttaattaatttactccatgccacgaacttatggggtaggtatgctatgatcatcatccccactttacmgacggggaaactgaggcacagagaggctaagaaacttggtcatactgtggccagccagcctgaaggccccgcctgaagtcaccagaggcaagtgatcctg

SEQ ID NO: 14864 - DNA, 201 bp, Homo sapiens
ccatcctaaaggctttacttaattaatttactccatgccacgaacttatggggtaggtatgctatgatcatcatccccactttaccgacggggaaactgasgcacagagaggctaagaaacttggtcatactgtggccagccagcctgaaggccccgcctgaagtcaccagaggcaagtgatcctggtgcctgctagagat

SEQ ID NO: 14865 - DNA, 201 bp, Homo sapiens
ctggtaaaacattatttctgggtgtgtctgtgagggtgtttccaggagagatcagcatatgaatgggtggactgggcaaaactcaccctccccaatgtggstgggcctcatccaatccactaagggcctgaacagaacagaaaggcagaggaagggcaaatttgcgcgctcttctagagctgagacatccatctcctcctc

SEQ ID NO: 14866 - DNA, 201 bp, Homo sapiens
acagaagtcaagcatggagctcttgcacttaagcctgagggcagtgggttgccatggagatgtggtcaagtttgccttctacgaagatcccctttgctcayatcctctccagccaggctggaacaccacggatgtgtcagccttcacactggctgttgtctctgtctgcgactcttctgcttggctatccatccacaaggc

SEQ ID NO: 14867 - DNA, 201 bp, Homo sapiens
ctgtggttcattccttcactttgtttagttcagacctcagcgaggccctcccagagaagccctgtctaaaacagtactgccccacccccatccctgtctaycccgttcctgctttggttttctgtgtaacacctatcaccatctgactttatactctttgcatactgtctgtctctctcaataggatataaactctgagaa

SEQ ID NO: 14868 - DNA, 201 bp, Homo sapiens
tagtccagccaggcgcgttaaggtgaacagtgaggcagtgattgacatgcattcacttcctcaggctcaacattcatagtcctggtgtcagcaggaggcasagagaggggtcagagcctcagaggtatctacagcaaagacaaggggagcctctgccacattcaggtggagccactgccccctgccccaggaattcaacct

SEQ ID NO: 14869 - DNA, 201 bp, Homo sapiens
tcctgatctcactgaatcttcagaacaacccagacagctggtcttatcagcccaccgtacagatgcagaaatggaggcccagaagacacaagtcatctgcmcaaggtgacaaagctactactctggaaagcagaacccagctggtaggatcccagaatctgtgcaattaagcccctctgccacaggcatgctggcactaga

SEQ ID NO: 14870 - DNA, 201 bp, Homo sapiens
tggtcttatcagcccaccgtacagatgcagaaatggaggcccagaagacacaagtcatctgcccaaggtgacaaagctactactctggaaagcagaacccrgctggtaggatcccagaatctgtgcaattaagcccctctgccacaggcatgctggcactagatgaagaattcaagaaataacaggcaggcctttcttctt

SEQ ID NO: 14871 - DNA, 201 bp, Homo sapiens
gaatgagccacatttaacctgggatcaataaccacacagcatgatccgaggaattcaggctaaatggaaactggctccatttggggccagtgtctggggcwtctcggtcatcgatagccagccacctgatgtcatcttgcccaactgaacactagaacaaagaacattttcctaccatgtgggaggcgaatgtttagaagg

SEQ ID NO: 14872 - DNA, 201 bp, Homo sapiens
gaccctgttaaatcgaagtcagaccacatcagttccctgctcttacctgccaaggactcccatctcactcagagtcaaagtcctcagcatgtctgcccccrtactccctctgctctggccttattggccgcctggaattctctgacattctcttacctcagggcctttgcacatgcagctgcttctgttggaaatgctctt

SEQ ID NO: 14873 - DNA, 201 bp, Homo sapiens
tgaatcctggctccatcactcactagccatgcaaccttgggcaagttgcttctcctctctgagctttggttttcttctttgtaaaatggggatcacagcartactcacaactcctagctcctgggatggtcaaagaagatacgaatggaaagcactaccacagtgtcatagagaacattcaacaaatctcagccactattg

SEQ ID NO: 14874 - DNA, 201 bp, Homo sapiens
aaggcccaaattatgggctagggtctgtgctgagcactagggatagggactcaatggtaaccgcacgtgcgatcgctgccctcaagcagtcagcagtcacrttgggtaactgggaaacctgtacaggcttttataataggacataatgaggcaagagctgtgaccaaaggaagcccgggggcaagaggagccgtggcctga

SEQ ID NO: 14875 - DNA, 201 bp, Homo sapiens
cagtcagcagtcacattgggtaactgggaaacctgtacaggcttttataataggacataatgaggcaagagctgtgaccaaaggaagcccgggggcaagargagccgtggcctgaaagtcactccccttgggaggatcagggaagtcttcttggaagaggcagcttctgagctgagggctgaagcacacataggagaaagt

SEQ ID NO: 14876 - DNA, 201 bp, Homo sapiens
gcagtcacattgggtaactgggaaacctgtacaggcttttataataggacataatgaggcaagagctgtgaccaaaggaagcccgggggcaagaggagccrtggcctgaaagtcactccccttgggaggatcagggaagtcttcttggaagaggcagcttctgagctgagggctgaagcacacataggagaaagtcaggtc

SEQ ID NO: 14877 - DNA, 201 bp, Homo sapiens
cacataggagaaagtcaggtcatatgaagtggggagaagaacattccagacagaaagcacatggcatatgcaaaggccaaggggtctctcaacatcacggsacagaaattaccatcctcattttacagatcctaaaactgagctcagagaggtgaaaccacttcctgaggtctcacagcaagaaagtggcagagctgggat

SEQ ID NO: 14878 - DNA, 201 bp, Homo sapiens
tgggctgggtccaaaagaaccgaggcttcacctgccctcagggtgtggccagcatttctgggatgctggtactagcaggttactcaccctgggcccacagrcatcctctcatttaatcctcccaacaagctggaggaagtagtatcactgtccctctgcaaaagaggaaatcaaggcaccgcgagctcaagtgccccttcc

SEQ ID NO: 14879 - DNA, 201 bp, Homo sapiens
cgctggggccacgcatggtgattcacacctgtaatcccagcactttgggaggctgaggtgggtggatctcctgatgtcaggagttcgagaccagcctggcyaacatggcaaaaccccgtctctaccaaaaaatacaaaaattagctggttatggtggtaggcacctgtaatcccagctactcaagaggctgaagcaggaga

SEQ ID NO: 14880 - DNA, 201 bp, Homo sapiens
cacacacacacacacacacacacacacacacacacagagagacacagacagacagacagacagacatgctctgcagtgtatttggccaggtggccaccagsctgagatttctgatgaagatcaaaaggtgacacattacactgttggcaactatgcagccacctggcaactggatctcagtttatgactttaagaccctct

SEQ ID NO: 14881 - DNA, 201 bp, Homo sapiens
attggagcgagcagagtggccagaccctgccgagttcgccatggtctccctgatccgggaactggcgatccacttggtctcgtccacagtggtgcgggcayggggcagcctcccgacgtccttcactgtcaggatgaggtgccgagatgacttaagcagcctgacagcctcgtcgtgtaggatgttgagaaagctccgccc

SEQ ID NO: 14882 - DNA, 201 bp, Homo sapiens
ccatttctaaaaataataatagccgggcacagtcgtgtgtgcctatagtccttagctacttgggagtccgaggcaggaggattgcttgagcccaagagttmgaggctgctgtgaactgtgattgcaccaccatactccagcctggacaactgagcaagatcctctctttttacaaaaatacttttaatgaaggaatgtaaa

SEQ ID NO: 14883 - DNA, 201 bp, Homo sapiens
tgcaatgcctactgtgtgctgggatgttgtgctgagcaggataatctgctcctgttccatttagctcacgatcaagggtgagctcagctttgcgtgatgamtgagtttccccatcagcctctccacactgtatccccagggcccagcacacagtaggaattaaaaaaatcatcagatgaggccaggcatcgtggctcatgc

SEQ ID NO: 14884 - DNA, 201 bp, Homo sapiens
agtgtagtggcgcaatctcggctcactgcaacctccacctcctgggttcaagcaattctcatgcctcagcttcctgagtagctgggactacaggtgcacaycaccacgcccagctaactttttgtattttagtagaggtggggttttgccatgttgcctagactggtctcaaactcctgagctcaggcgatccacgcggct

SEQ ID NO: 14885 - DNA, 201 bp, Homo sapiens
aacaacctgatcctgaggctgagctgggagacgggaatccatcctctcaggccgcgcgtgcacctgtaccagccacgctgggaagggcccgaaagaagccratttcagagttgccttcagcaccctcccaagcctgtgttaaaatggatcttgcggcttcaagggaggaccctgttggctacagcattatcacaaggaaaa

SEQ ID NO: 14886 - DNA, 201 bp, Homo sapiens
aagagttttattgcaattatgaatctttaatagttttccatgtcaggtgtaaaactttaatgggctgtttttttttctttcattacaagtaagcaatacarttttaatgagacattagtttttcccaacagttcaaaagtcagtaaagcttgtccatattttgaaaaagaaaataaaaagatgcaggtaattgctaagaca

SEQ ID NO: 14887 - DNA, 201 bp, Homo sapiens
ccaaccctctctggtttagagctctcacaaggcagaacctaaccagaaatgctgtggatggacccggcaaggctaatgcacactgactcccaatatggtcyatgcttccttccggttctctcttctgacattggcagatccgttgttagtacctgcttactctattcaccacacaggaagcctcaatgaaggcctgctcta

SEQ ID NO: 14888 - DNA, 201 bp, Homo sapiens
aataatggaaatgttctataactaggctgtccaacaactattatttacatttaaattacaataaaattaaaaattcactcccccagtcacacaagttccayttcactagccacatgtgactaatggccaccatcctgaacaagcctaaacacagccccagatcaaacccctgaccttctccgattctttcctccaagcctg

SEQ ID NO: 14889 - DNA, 201 bp, Homo sapiens
tactttccttatgtagaagacagattcatttaaactgcaaacctgatctcgtcacaccctcctttaaaatgccccagtagcttccaagctcctctgcctascctgagaggggccttagcatccgaaccaatctcgcaccttcctcccctactgctttttttccgatccaaccatacttgccatctctcagttcactcaaca

SEQ ID NO: 14890 - DNA, 201 bp, Homo sapiens
tagaagacagattcatttaaactgcaaacctgatctcgtcacaccctcctttaaaatgccccagtagcttccaagctcctctgcctagcctgagaggggcmttagcatccgaaccaatctcgcaccttcctcccctactgctttttttccgatccaaccatacttgccatctctcagttcactcaacagatggagcccttt

SEQ ID NO: 14891 - DNA, 201 bp, Homo sapiens
catcaaggtaccatttctcatctatcagattgagaaaaaaatttaaaactttacagtgaccgtcagctatggagaaacaggcacacttttacacagctggygggaattcaggatggtccaacacttaacggaatcccactttcttttttttcttttttttttttttttgagacagagtctcactctgtcacccaggctgga

SEQ ID NO: 14892 - DNA, 201 bp, Homo sapiens
aataggtgttggcaatattgtacacatcatatgagtattctacactgctggaccaatcaccacaaactcagtggtttaaaacaacacgaatttattatctyacagttctggggtcagaaatctaacatagatctcactgggctaaaatcaagatgtcagcaggacagagttcctttctggagagtccgggggacaatccaa

SEQ ID NO: 14893 - DNA, 201 bp, Homo sapiens
tgggctaaaatcaagatgtcagcaggacagagttcctttctggagagtccgggggacaatccaattccttgccctttccaagctaccagaggcctcctacwttcctactttggtagccccttcctccatcttcaaagccagcaacctcgcaccaacaaggccttcttatacagccacctctctggttccctccttctgatt

SEQ ID NO: 14894 - DNA, 201 bp, Homo sapiens
catagcacaggccaccatcatctctcccaccttctctaacacctccctctatgtttgggggtctggggtagagtgggtctaggccctcggtagatatgccrtgccacgctggagaagaatcttctttatctcacccagtccgttccatgcctcttagtaatttgggataaatcatttctgccccacactgggctctgaagc

SEQ ID NO: 14895 - DNA, 201 bp, Homo sapiens
aaatgcgatatcaccatacaacagaatactattgtcataagaaggaatttcctggtagatgctacaatattatgctaagtaaaagaaggcagacacaaagrccacatattctatgattcattgatatgaaatgcccaaaataggcgtatctagagagacagaaagcagattagtagcagttttcagggagtgaagggaggg

SEQ ID NO: 14896 - DNA, 201 bp, Homo sapiens
attgaacttattactttagtagctggaaaaataaaactcaaaacaaacaaagggtctggctcaaaccctttgaggtttttgggccaaaagctctagtgcaragcaccactcagttccctggacatcccaaactctgaaagctcttgcctccttccatctgccttaactcatagctccttgactttggaagtaataccctca

SEQ ID NO: 14897 - DNA, 201 bp, Homo sapiens
tcttggaaaagctgttggagcatgtctccttccctaccccttccccctccctccccaactctcctctctgtcagcccctcagtccctctcagcccgcctgyccgtccctgacccccatgcttctatgtctgtgctcctcccaattcttcctggaagagctcttccttcacttctctgcctggcataatcttccacattcaa

SEQ ID NO: 14898 - DNA, 201 bp, Homo sapiens
tctccttccctaccccttccccctccctccccaactctcctctctgtcagcccctcagtccctctcagcccgcctgcccgtccctgacccccatgcttctrtgtctgtgctcctcccaattcttcctggaagagctcttccttcacttctctgcctggcataatcttccacattcaatgccccaaccagaccgcactcttc

SEQ ID NO: 14899 - DNA, 201 bp, Homo sapiens
tgctgtcaccttgattttggacttctggcccccataactgaatacatttctgttgttttaagccacccagtgtgtggtcatttggtatagcagccctaggmcactcacatagaaagaagggcctagtcccctctcccccttgaaactgcctggacttgtgacagctttaaacaagaaagcccagctgagggatactctgtg

SEQ ID NO: 14900 - DNA, 201 bp, Homo sapiens
aaatccaactaagagagtatcataaggaaggactgagaaggtggcacagctgggggcgggtggggagcagaggctacagcaatcactcagcctgtggcagsttcttgggaaataaatcaccttccggctccttgggaaagaggttcatcatcaatgtcaattcatcagctatctgagcatcgcagatgtaactgcagatca

SEQ ID NO: 14901 - DNA, 201 bp, Homo sapiens
tggcacagctgggggcgggtggggagcagaggctacagcaatcactcagcctgtggcagcttcttgggaaataaatcaccttccggctccttgggaaagasgttcatcatcaatgtcaattcatcagctatctgagcatcgcagatgtaactgcagatcagtcttgccacaagcaaatcgcttagacaattacagctacca

SEQ ID NO: 14902 - DNA, 201 bp, Homo sapiens
cattattatcaaaaactggaatctacaggagcttgggaagcactgctcctctatagtctctacgaaggaagcaagagccaactctgaggcttaggacttgkggacccgcccaggagtgagaggtggctactgcacctcagggataggcactcccgagggcatggctcattagaaaaaacccactccagcaaaaggggctgg

SEQ ID NO: 14903 - DNA, 201 bp, Homo sapiens
tccaaggtaaaatagaaagtcctttgccagtctgaggcactgtgactttgtgctcagctgtccctgttggcatcagcacagaggtaaggcatgtggccttrgggagccctgcctttgaatcacagcttctctgccaactaaaaatatgttttggggcaagctgcttaatctcattgagtctcgggttctttatcagtgaaa

SEQ ID NO: 14904 - DNA, 201 bp, Homo sapiens
gtaaaatagaaagtcctttgccagtctgaggcactgtgactttgtgctcagctgtccctgttggcatcagcacagaggtaaggcatgtggccttggggagscctgcctttgaatcacagcttctctgccaactaaaaatatgttttggggcaagctgcttaatctcattgagtctcgggttctttatcagtgaaataggca

SEQ ID NO: 14905 - DNA, 201 bp, Homo sapiens
gaacgcacacaccacacacacaggaaaaccccaagtgaagaccattcgctcctccctaattttcacaaagcagtaaattcaagctgcctacaggggaaggycctgccctgtgtccctcccccagtctgcctgagaaccacttcacaaagagaggacccatctaagttctgtaagaacctctggggttcaccagagaaggta

SEQ ID NO: 14906 - DNA, 201 bp, Homo sapiens
tgattcactgtaggcacagtactcactaagcaccatggtgggacagagggcggactcccaaaatgctggcaattgctgttgttattcctgcatgttagaartaactagaagactgctcaccctaatgacttatttctgttactactatttcctcagcaacataggaaaggtaaagaataaaaattaaaattaaaaaatgta

SEQ ID NO: 14907 - DNA, 201 bp, Homo sapiens
ctgaaataagaacaaattggaggactctgtacccaacttccagacttactgtaaagctacagtaaacaagatagggcagtgttaatgaaaggctgggtgcrtagatcagtggaacagaatagagtccagaaataaacccacacaaatatacccaagtgatttttggcaaaagagcaaaggcaattcactggagaaagggta

SEQ ID NO: 14908 - DNA, 201 bp, Homo sapiens
gtagtcctttcagcagatggtgctagaacaattagctgtctatatgcaaacaaatgaacctcaatctcacactttatatgaaaactcaaaataaatcataractaaaatgtaaaatgcaaaactataatactgttagaggaatatataatacaaaatctatgtgaccttgggttagacaaaatatggctaataaaagattg

SEQ ID NO: 14909 - DNA, 201 bp, Homo sapiens
tcccaagtagccgggactataggcatgcaccaccatgcctgaaaagatgaaaagatacttttaagagaagacaaagacaagccacagaatgaagatatttkccagccaggcatagtggctcatgcctgtaatcccagcactttgggaggcagattgcttgagcccaggagttcaagaccagcctgggcaacatgacaaaac

SEQ ID NO: 14910 - DNA, 201 bp, Homo sapiens
tgtacaaaaaatacaaaaaaaattagccacatatggtggtgcatgcctgtagtcccggctactaggaaggcggaggtgagaggatcacttgagcccaggargtcaaggctccagtgagctatgatcatgccactgcattccagctggggcaacagagcaagaccctgtctcaaaaaaaaaaaaaaaaagaaaatattttcc

SEQ ID NO: 14911 - DNA, 201 bp, Homo sapiens
aaaaaaattagccacatatggtggtgcatgcctgtagtcccggctactaggaaggcggaggtgagaggatcacttgagcccaggaagtcaaggctccagtragctatgatcatgccactgcattccagctggggcaacagagcaagaccctgtctcaaaaaaaaaaaaaaaaagaaaatattttccaatcacatttctaac

SEQ ID NO: 14912 - DNA, 201 bp, Homo sapiens
gcatttgtcaaattcgtagaactgtacatcacagagtgactttatataaatttgtaaaactcaaccaggatgtgtatgggagggggcacgtgtcgggcacrgggaggaagatagaatgcagactgagatgaatgaagacagcagaactcttacaaatgatttccataaccacactgcaaggggatagagaagaaaggaacc

SEQ ID NO: 14913 - DNA, 201 bp, Homo sapiens
attcgtagaactgtacatcacagagtgactttatataaatttgtaaaactcaaccaggatgtgtatgggagggggcacgtgtcgggcacggggaggaagayagaatgcagactgagatgaatgaagacagcagaactcttacaaatgatttccataaccacactgcaaggggatagagaagaaaggaaccgacttaagtag

SEQ ID NO: 14914 - DNA, 201 bp, Homo sapiens
acagaaaccaagaagagtcgtatataaacactgtacttcagttgggaatttttctccctcctccaaagtatatgggttaggggccaggtgtggtggctcaygtctgtaatcccagcactttgggaggctgaggtgggtgaatcacttgaggtggggcgtttaagaccagcctggtccacatgaggagacccagtctttact

SEQ ID NO: 14915 - DNA, 201 bp, Homo sapiens
tcagttgggaatttttctccctcctccaaagtatatgggttaggggccaggtgtggtggctcacgtctgtaatcccagcactttgggaggctgaggtgggygaatcacttgaggtggggcgtttaagaccagcctggtccacatgaggagacccagtctttactaaaaatagaaaaaaattagctaggtgtggtgatgcat

SEQ ID NO: 14916 - DNA, 201 bp, Homo sapiens
ctgggattagaatcagccttattagtgtggactcatttaccaaaagaaaaaaatactgtgtatgtatatacacagagatgaatacatacagatacgggtaygtgtgcatgcatgagtcattatacatatttactgttcctctatccattgagaaggaactgtaggctgggacaccccaataaaaatgggtacacctagcac

SEQ ID NO: 14917 - DNA, 201 bp, Homo sapiens
aggcatcagttggccaggcgcgggggctcacgcctgtaatcccaacagtttgggaggccgaggcgggtggatcacttgaggttaggagtttgaaaccagcytggccaatgtggtgaaaccccatctctactaaaaatacagaaattagccaggcatggtggcaggcaccagtaatcccagctactcgggaggctgaggcag

SEQ ID NO: 14918 - DNA, 201 bp, Homo sapiens
gttggccaggcgcgggggctcacgcctgtaatcccaacagtttgggaggccgaggcgggtggatcacttgaggttaggagtttgaaaccagcctggccaaygtggtgaaaccccatctctactaaaaatacagaaattagccaggcatggtggcaggcaccagtaatcccagctactcgggaggctgaggcaggaggatcg

SEQ ID NO: 14919 - DNA, 201 bp, Homo sapiens
tgtggtgaaaccccatctctactaaaaatacagaaattagccaggcatggtggcaggcaccagtaatcccagctactcgggaggctgaggcaggaggatcrcttgaacccaggaggcagaggttgcagtgagccgagatggtgccgctgcactccagcctgggcaacagagccagactctgttcaaaaaaaaaaaaaaaag

SEQ ID NO: 14920 - DNA, 201 bp, Homo sapiens
aattagccaggcatggtggcaggcaccagtaatcccagctactcgggaggctgaggcaggaggatcgcttgaacccaggaggcagaggttgcagtgagccragatggtgccgctgcactccagcctgggcaacagagccagactctgttcaaaaaaaaaaaaaaaagtgggcacgagtttaagcagaaaaaggattttctg

SEQ ID NO: 14921 - DNA, 201 bp, Homo sapiens
gcagaaaaaggattttctgtgtgtggtttcaaaatatctctatcagtgtacttcataattataaagggaaaatagtaagtttacagtggcggattctggcygtcacccttagcagagcgtaatacatattttttaaaatctttactgtgttttccaattgcaaaaataatacttgctagttgtagaaaagagaaataattt

SEQ ID NO: 14922 - DNA, 201 bp, Homo sapiens
ccttctcaaaagtagaagcacaaaaatgtagcaaatgtgtatttttgcgggcttcatattatcattttttcctattgtgattcaaaatctataatgttgtyccttctgctgtcagagaaaaaaatgtgggaaggagaaactacaaaatgtctcctgagcatgcttgtgttttcattttccttgagcagcggggcttggaga

SEQ ID NO: 14923 - DNA, 201 bp, Homo sapiens
gggatctggctccagaacctcccttgggcaggggatatgatgtgtaaagaacattcattctttacctcatgtagccatgatctgggagaagagacattcaytaaacaagtgctcccaatttatagatgggttaagagtttcagccaggcatggtggctcacatctgtaatcccagcactttgggaggccaaggcgggcgga

SEQ ID NO: 14924 - DNA, 201 bp, Homo sapiens
tccccagtgttggaggtggggctgggaggctaccatagccacaggcatagtagtgaccccaagattgggacattcatgagaacagagatcctgttccaagragcctcagccaggatggcagttggtccccaggagcagaaatgaaatgtgctcccacccctggggaaactcaggtgtggaggccgtgggccaggcaagatc

SEQ ID NO: 14925 - DNA, 201 bp, Homo sapiens
atttcaaccgaaatgcttcctcctccaggaagtcttcccagatatccaagaccagggttggtctcccctggcatacactcaattggttccatgtgctttgycatcttggtattattacaattgtaactaaatacacagttgtgtaatttgtttttgtttttcttactagaatataagctgaggaggtcagagactgtgtct

SEQ ID NO: 14926 - DNA, 201 bp, Homo sapiens
agggtgttctggaatatcactcatccaggcttcatctcttttcctgtcccccattttccttcgccccaatttcctccactcattcaaaatttttgctctaygtaaagagaactctctgcaacttttcaggccaggaaactgtacagatctaggagaagtcctcggagatcatctagcccaagtgtccaagcagggagactg

SEQ ID NO: 14927 - DNA, 201 bp, Homo sapiens
caggctctgtcaggcctcggtttaaataacagctctgataacagaaagaatttgatcttgggcaactcagtttaagtctgtaagtcttggtttcttcagcygtaaaccgaggactgacaggcgccataccatagtagttaagaacgtggactcagagtttgctggagtgagttaaaatctcagttctagcacttagctggg

SEQ ID NO: 14928 - DNA, 201 bp, Homo sapiens
aacagaaaaaagacatgagtggagaaactgtgaataaggcctgtagtttgtttaacaatattgtactgatgttagtttctcggtcttgacaaatataccayggttatacatgatgtcaacactagaggaagctgggtgaaggataaacaggaactctcggcaacttttcactaagtctaaaattattccaacatacattta

SEQ ID NO: 14929 - DNA, 201 bp, Homo sapiens
ctcattcctggatgggaatcctggctttccctctcattggctgtgcaactctccgagcctcacctactgagcctgtaaaatggtgctcaccaaagggtaawtgcttgaggggatggataccccattctccacaatgtgattattacacactgcatgcctgtatctaaacaccacatgtatcccacaaatgtacacacctac

SEQ ID NO: 14930 - DNA, 201 bp, Homo sapiens
tgggaaagaagacacacgatccatgtaaattaccatgtctataacaatgatgataatgatgtttgtctgagtcaatctgggctgctataacaaagtaccayagactgggtggcttataagcaacagaaatttacatctcacagttttggaggttggaagtccaagatcaagacgccagcaggttcagtgtctggtgagggc

SEQ ID NO: 14931 - DNA, 201 bp, Homo sapiens
agggcactaatcccattcgtggggctccaccctcatgacctaatcatctcccaaaggccccacctcctaatactatcagcttgtgggtaaggatttcaatrcatgaattttggaggaacacaatctgtggcaatgtttactataataataagaattccccatttgatctttgcaataaccctgagaaaggaatgttaccta

SEQ ID NO: 14932 - DNA, 201 bp, Homo sapiens
tctcctgtcacctaagggtctcctgtcacttcaggagtctcctatttctccgggggtctcctgcctccccaggggtctcctatcacctgggggggtctatytctcctgacgtctgctgtctccccaggggtcttctgctctgccatccatcctgagggaccatgatggtccctggctctacatacatagggtgcacccact

SEQ ID NO: 14933 - DNA, 201 bp, Homo sapiens
acctaagggtctcctgtcacttcaggagtctcctatttctccgggggtctcctgcctccccaggggtctcctatcacctgggggggtctatttctcctgaygtctgctgtctccccaggggtcttctgctctgccatccatcctgagggaccatgatggtccctggctctacatacatagggtgcacccactaaatgcagt

SEQ ID NO: 14934 - DNA, 201 bp, Homo sapiens
ggggcttggagatgagacagacacagtcctgctcctgaggggcccgcagtctagtggtacagacagtcaacaggccttcacggtacagtgtgagcagcgcstgacaaagtggctcgagggccacatgggtacagagaaggggcaatggtcctgactggcgtgggggggtgcttcctggagaaagtggcatctctgatgaga

SEQ ID NO: 14935 - DNA, 201 bp, Homo sapiens
ggtggggctcacaaggacacgcaaggggtggctgcgggcagattctagaacggttcctaatccatgagggaagctgcaggaacatgcaggttaagtgtgtstccggtatgaaagagggattcatggaaaagaaagcaggggaccagaatagctgaaacctagcccaaagagacgagaaacacctggccacaagacccagtg

SEQ ID NO: 14936 - DNA, 201 bp, Homo sapiens
ctgcaggaacatgcaggttaagtgtgtctccggtatgaaagagggattcatggaaaagaaagcaggggaccagaatagctgaaacctagcccaaagagacragaaacacctggccacaagacccagtgacaggtaagggatccaaagagagcacagtgtgactgcccacgggacagggagcggtgggagaaccttcaggca

SEQ ID NO: 14937 - DNA, 201 bp, Homo sapiens
ttgtcacaggcagctctgcatatttgggaggaaaccacatggtggttaatgcatgttcaggctccggagccagactgccaacttgctaggtatgtggcccyggccaagttgcttcacctctctgtgcctcagtttcctcatctagaaaatggggaaaccagtcacgctcacttccttgggctgctgtgagggatgaatggg

SEQ ID NO: 14938 - DNA, 201 bp, Homo sapiens
tcatctagaaaatggggaaaccagtcacgctcacttccttgggctgctgtgagggatgaatgggtccatttgtgtagagtgcgtagggtcgtggctggcamagggaagcactaggaaacagtggctgtcgttatcctcacagtggcatctcagccaagccagcaggtgcgacctggaaagcaggtgtggccttcctcaggg

SEQ ID NO: 14939 - DNA, 201 bp, Homo sapiens
tgggcaaatgaccggggaggggtgaaaggggcatctgagttctacaaatagctgttcctgcccgcatcattcctccgagcagattccagatgctgaccaasatgactggtgctgtgtgcaggcaggctctgctgtctctcctggatggagccaccactgtggctgtgcgagggccggacccaaagagccagagccagggga

SEQ ID NO: 14940 - DNA, 201 bp, Homo sapiens
ctgctgtgaccttcagcactgtcatcatgttgctaaggcatcacataaaggcccaaagtgaagacagatcaggaaaaaactcatactacctcacacccacraggacagctactctcaaaacaacagaataacaggtgctggccaggatgtggaggaagaggaaccctggtgcactgttggtgggaatgtaacatggtgcag

SEQ ID NO: 14941 - DNA, 201 bp, Homo sapiens
cccagagagaagggtaagatatcagggaccatttcagccttcctgtgtttcaagaaacagtacaggtctggggtcaggagggctccataggggacatctaytggtgtccctgcccccttctgcaagttagaacaccccacagtgctttgggcaaccacccctctcccactggctacagtcttggtggtcttgtcaatcaaa

SEQ ID NO: 14942 - DNA, 201 bp, Homo sapiens
atcctttggatgtaataaaccctagccacaggtacaaccatatgctgaatcctgttagcctttctagagaatcactgaacccaggtgtcatcttggggacyctgataaaataccaagcacagagtcgacagataaaaacaatgatagcaatcgcttaacatttataaagggcttgtatgtgtcggccactctgcgctgcac

SEQ ID NO: 14943 - DNA, 201 bp, Homo sapiens
tcagtagctttgtaggaagagagagttctggtctctcttcatgtggggacacaatgagaagatggaagttttcaagtctgaaagtgggccctcaccagaayccgagaacaatggcaccctgatctcagacttctggactccagaactgtgagaaattaaatgtctattgctaatgccacccagtctatggtattttgttat

SEQ ID NO: 14944 - DNA, 201 bp, Homo sapiens
aaagttcagagccttcttggccacacagtaggagctcagcaaatggcagagcccactcccctccccctcagcatgtctgcatggagatcgaaaaccatgcrgtagcaaaacgttgaccaaggagtttaaaaaaaaaaagggaaggaaagaataaagaacaatgcgcagagcatcatttgtattctttatcaccagcaacag

SEQ ID NO: 14945 - DNA, 201 bp, Homo sapiens
aataaagaacaatgcgcagagcatcatttgtattctttatcaccagcaacagtagaatcctcttggtcagttctataaataggccagcagcaaccttgcgmacggagaggttaatgcccttgatgagaacaccacagagagccagcgccggagagggcctgggccaagtcgctgagtctcccacaggctgcccacccccag

SEQ ID NO: 14946 - DNA, 201 bp, Homo sapiens
aatgtgtgtgggtcatgcagggaaggggaagaggacggtctctgctcctactgccttcttgtctccatttctacaaaccattgcttgcttattttaacggrcatcattcaacaggagagttatttcctaaacaaagctggtcatgttttttcccctgtagccaccctgccagcctttcaaactcacccaccattgctacct

SEQ ID NO: 14947 - DNA, 201 bp, Homo sapiens
tgggtcatgcagggaaggggaagaggacggtctctgctcctactgccttcttgtctccatttctacaaaccattgcttgcttattttaacggacatcattmaacaggagagttatttcctaaacaaagctggtcatgttttttcccctgtagccaccctgccagcctttcaaactcacccaccattgctaccttgatccct

SEQ ID NO: 14948 - DNA, 201 bp, Homo sapiens
gaaggccagagggctgcccctccgaggccacggctgtgtccttgctctttgtaggaagctgcctgcaggtggtaagtcacatccaacacatccatctgcaygctagtgactctccatcaaccacacccctctctagccatgacagctccacaggatccaccagtcttcctgaatcaatggcatattagctgtgccacctca

SEQ ID NO: 14949 - DNA, 201 bp, Homo sapiens
gtctaagacccatcttagtgacccagaagggaggaaaaaattatgcatgcctgctcttcgcagccgcaccttgcctagctggggctttgtgtgttcagacwcaccggacaatggtgttggctctgtagatgacttgctgtgtgacactgagccaattgcctaaactctctgtgcctgtttctatatttaaaaagcaattgc

SEQ ID NO: 14950 - DNA, 201 bp, Homo sapiens
attcaatgagttttctatatgccagacagcctcaggaatctgttcaaattaggacacagagcagtgctctttcagatcagtagtcaggcagtccacacttytccactttaatgtgagcatagacacattagatacacatggaatttggagagacaagtgaagaaagtgtggttaagagccacagccctggaggtaggctgt

SEQ ID NO: 14951 - DNA, 201 bp, Homo sapiens
catagacacattagatacacatggaatttggagagacaagtgaagaaagtgtggttaagagccacagccctggaggtaggctgtgggaattccatcctagytctgccacctgccaacagtaaccttgggcaagttacttacccaatctgtgccccagcttcccaggcaaaaaaaaaaaaaaaaaaagagagaaataacata

SEQ ID NO: 14952 - DNA, 201 bp, Homo sapiens
cataggtattatctcacagggtagttctgatgattaaattagtgtgtgtgtgtgtgtgtagagtgtgtgtgtgtgtgtgtgtgtgtagagtgtgtgtgtgwgtgtgtgtgtgtgtgtatatatatatatatatatatatatatatatatatatatatatatatataatatatatagtgtttagcacctggaacctaggtaa

SEQ ID NO: 14953 - DNA, 201 bp, Homo sapiens
gaaagagataacagaggtattatctcacagggtagttctgattattaaattagtcaatatatatataaaaggtttagcacctggaacctaggtaagagatmccaaaaaaaaattttttttttttttttgtctaacaagaaattctgggtactgtagagaactcagtacccagaacccagagtggaagtctcaacccaccac

SEQ ID NO: 14954 - DNA, 201 bp, Homo sapiens
ctaaaaatgtattttgaagatcttttcttaccagttcaatgacataaagctcatctcttccaatactccatcccattccctggaagggactcaccactacygaattctcattctcctatcaatggacatttagggtgtttctcattttttgctagcaccatcacctgcgatgaacatccttgtatgtgccatcttggggca

SEQ ID NO: 14955 - DNA, 201 bp, Homo sapiens
acactccttcgtgctttcttccacagtttccaaaaagctcccagtttaggcagatcttggctctatcttccaatcatctgggggctaaatcttgggccctraagcactgcaaagcaccaaaatgaaaacggtaacctggtggtgtcttagggtgcgaactccctcaaaagtgttttccagtggaaggtacagttgctagaa

SEQ ID NO: 14956 - DNA, 201 bp, Homo sapiens
tcttggctctatcttccaatcatctgggggctaaatcttgggccctaaagcactgcaaagcaccaaaatgaaaacggtaacctggtggtgtcttagggtgygaactccctcaaaagtgttttccagtggaaggtacagttgctagaaagccattctcaaacggtgttcaaccccttcctagctatgagacttcagacaagt

SEQ ID NO: 14957 - DNA, 201 bp, Homo sapiens
accaaaatgaaaacggtaacctggtggtgtcttagggtgcgaactccctcaaaagtgttttccagtggaaggtacagttgctagaaagccattctcaaacrgtgttcaaccccttcctagctatgagacttcagacaagttacttaacttctctggcctcagtgttcccacctattaaaaggggccataacgcctatgctc

SEQ ID NO: 14958 - DNA, 201 bp, Homo sapiens
tatgcacggtcacagaagataaaaggcagggcttttatacctctctcctcgcttctctccattgccctctcaccagcagtttaaggggattcacacccccytaaacaccaggccaatcctacaccttggcccaagacagacaggggagggtttttaaaaaggacatgggcctcacaggatgtaaacaaaagaaagtccctt

SEQ ID NO: 14959 - DNA, 201 bp, Homo sapiens
acggtcacagaagataaaaggcagggcttttatacctctctcctcgcttctctccattgccctctcaccagcagtttaaggggattcacacccccttaaayaccaggccaatcctacaccttggcccaagacagacaggggagggtttttaaaaaggacatgggcctcacaggatgtaaacaaaagaaagtcccttagggt

SEQ ID NO: 14960 - DNA, 201 bp, Homo sapiens
tcctacaccttggcccaagacagacaggggagggtttttaaaaaggacatgggcctcacaggatgtaaacaaaagaaagtcccttagggtcttgaaccccragcaggtgctgtgtccagccacatggactggaaagtcccttcccatttagccctgctttgagggaggacagaaattggtgatgcggactctgccccagta

SEQ ID NO: 14961 - DNA, 201 bp, Homo sapiens
atttctccttttgccttggttgctagggggctcagaattcaatttcaatataaatactgttcctatcaaaggcaccacacacacatacacacacacacacrcgcacacacacgtacacacacacacacgcacacacacgcgtgcacacacacacacacactttccaagatcacttctgattcctctacctttttaatgaag

SEQ ID NO: 14962 - DNA, 201 bp, Homo sapiens
ttctccttttgccttggttgctagggggctcagaattcaatttcaatataaatactgttcctatcaaaggcaccacacacacatacacacacacacacacrcacacacacgtacacacacacacacgcacacacacgcgtgcacacacacacacacactttccaagatcacttctgattcctctacctttttaatgaagtg

SEQ ID NO: 14963 - DNA, 201 bp, Homo sapiens
aaagaactgtggcttcacagtagcatcctcaacatctgtgtgctcatcagggagccaggacccgcgacacagccatgccacgacacggtccatctgctccrgctctgtgcggccacctcgcttccttgcgctgctgcatcccagggtaaatcgagtggaccacagagcattggtgtgaactcatccaagaccccatccctg

SEQ ID NO: 14964 - DNA, 201 bp, Homo sapiens
agtagcatcctcaacatctgtgtgctcatcagggagccaggacccgcgacacagccatgccacgacacggtccatctgctccggctctgtgcggccacctygcttccttgcgctgctgcatcccagggtaaatcgagtggaccacagagcattggtgtgaactcatccaagaccccatccctgaaatgcagcccaacataa

SEQ ID NO: 14965 - DNA, 201 bp, Homo sapiens
aatgcagcccaacataaggatcattaaacgcaatgacaacatacgtcaaaaagaaatgcaaggaagcaggtgattcgacaattgaggaaatgtgaatacayaaggataaaggccaggggagatggcagagaaatgtatgatgtccagttagaaggatgggaacgtgggtgtcttctccccttttctggttttctttaatgc

SEQ ID NO: 14966 - DNA, 201 bp, Homo sapiens
gctgttaaacgctggtgggagggaatatacaaaacaaattccgtcccaggggcagtctggcaacagttaatcagaagctttaaaattgcgcctctcccccragccaatgccacctctagaaagacagcccaaggaattattagaaatgtgcttaaagatgaatgtgcagggatgtctaaagcagcaatatggataatatta

SEQ ID NO: 14967 - DNA, 201 bp, Homo sapiens
caagcagatcacttgagcccaggagttcaaagctgcagagagctgttatcgcgccactgcactccagcctggccaacagaataagaccctatctttttttwaaaaaaaaaaaaaaagtgggggtgggggggtggggagaaaaaacgttttatttaacagcctagacaaattcctctattccatttgtttcctatgaccaaa

SEQ ID NO: 14968 - DNA, 201 bp, Homo sapiens
aaaaaaaagtgggggtgggggggtggggagaaaaaacgttttatttaacagcctagacaaattcctctattccatttgtttcctatgaccaaacaaaatgyccctttaacttgtccagtctgtgacagcagagttaatgaccaccagcctttcacatgaggcccaggagagagaccctcctctcatccttgaagtgtgctg

SEQ ID NO: 14969 - DNA, 201 bp, Homo sapiens
tctatcaaaggttattatcatacaatgagcaacaaagaaaaaaaacaccaagaaatgcattatctgtgtcatgacagaagtgagaaaggccatgacactgsgggggggagcgggtttcaggagggaagagcaggctcctcagggtggggacagcggcagaggtgagcaggcaggtcctctggagaggacgtactgaggttg

SEQ ID NO: 14970 - DNA, 201 bp, Homo sapiens
atccatttatgcatgctcagagaataaagcagcttttaagcatatgtgtggttactggaaacttggccttcacccaaaatgctgggtttctagaaacctgracagtttttgttttttgtttttaaaaaaaaaaaagaaaaggaaaaaaaaaagaaagaagcccaaaagccagaagatatatctcacccaaaattggttcat

SEQ ID NO: 14971 - DNA, 201 bp, Homo sapiens
ttacactcaaatagcagagggttccaaatgttgccacacctagtagtcatttgctccccacagccacctgggaaggaggcaggtgggaggtagttatgccyatttcacagctccaaagactgaggttcagagatgtcacgtgaactgcccacggccacaaagccagcttggtggtaaagcacacactagagccagtggctt

SEQ ID NO: 14972 - DNA, 201 bp, Homo sapiens
ctggccaatttatcaagcacatttggctaaaaacctttgaaaggtctacttttttattattattagtttggctcctgttcaagatattttttcaaaaatcwaacatttcaacataattgcaaatagtccatggcttaccttatctggacctgtcactgctgattttgcaaatgggtttcaagagaggggtggaagccccaa

SEQ ID NO: 14973 - DNA, 201 bp, Homo sapiens
cataaattattaggtaacttgattcctaaaatttaatttaatttaatttttattacacacacacacacacacacacacacacacacacactgaatctctcygtttgggaagctcagaggatctcctccccctcaccccaccttccatcgcaggaaaaaaaatattgttaagactgaaaacacatcttctactaaatgcaat

SEQ ID NO: 14974 - DNA, 201 bp, Homo sapiens
tcctcaggaaatgacgtcccgcccggtgcgcctggccgttgcctggagacggggtgaaacagtccagccccagggaagaaaggggtgaacgcggcggtagkggtgggaggagcccccgcgtcccctaccccgccggcagagccgggagcggggctcagaaacagcgctcttcggcggtcgcagcgagtgccgacaccagga

SEQ ID NO: 14975 - DNA, 201 bp, Homo sapiens
aaaatcctgtgcttttattctaatggggagcttcatagtgctacacacacacacacacacatacacacacacaccctacctcacacacatcccttccaacstgagctgcctctcctaagctactcttctatgtatttttcgtaaaagtcttccagaatttccattgcagagccagctgacatctatccagggtagggcaag

SEQ ID NO: 14976 - DNA, 201 bp, Homo sapiens
catgctcagctctcacttagtttgttttaattataattactgtgattggtttgataaatgcatcccaggagctaagatccccagtcccaacattttatttmtgtgcaaaggatgttttcaagaaggtgttttgctttaggcagcagaaaccaggctgcatgcagtcttagtagaaaaagaaacactttcttctgcaaacat

SEQ ID NO: 14977 - DNA, 201 bp, Homo sapiens
tcacttagtttgttttaattataattactgtgattggtttgataaatgcatcccaggagctaagatccccagtcccaacattttatttctgtgcaaaggaygttttcaagaaggtgttttgctttaggcagcagaaaccaggctgcatgcagtcttagtagaaaaagaaacactttcttctgcaaacatcagagaccgtct

SEQ ID NO: 14978 - DNA, 201 bp, Homo sapiens
aagacctgggagaaaaacctgagtacacaacttgcccttggttgcatactgccctcttcagagggaaaatattattctcccatgcatgcagcaggcttccrtttgctttcttcaccaaagccacttttaattgttcattaacgctccccagctctggccagtgaatgcccttcccttcccttaggaatgttcctggaaact

SEQ ID NO: 14979 - DNA, 201 bp, Homo sapiens
cccatgcatgcagcaggcttccgtttgctttcttcaccaaagccacttttaattgttcattaacgctccccagctctggccagtgaatgcccttcccttcycttaggaatgttcctggaaacttgaacacactggagcagttgaaaagacagaaggaagaagaataaattgtgttgggcgtttttctttttcttttttttt

SEQ ID NO: 14980 - DNA, 201 bp, Homo sapiens
tgtatttttcatgaagacaggatttcaccatgttgcccaggctggtctcgaactcctggggttaagcaatccatccaccttggcctcccagggtgctggarttacagatgtaagtcaccacagcaggccagtggtttagttcctatgtgttgattttaaccaagaagttgagctgcactctggataccaggcagaaaacca

SEQ ID NO: 14981 - DNA, 201 bp, Homo sapiens
ctcagagcttccctttaactagttgtgtgaccccacagcaagtggcttcacctttcatttgtaaaataaggctcccaaacgtcctgcctccccaacatccygcctccccagaagacaactgcaacctgtatgtttcatgttctgtgcagcaaatgaaaacatgttgcaactcatggagtaacatagagttattttccctct

SEQ ID NO: 14982 - DNA, 201 bp, Homo sapiens
taaagctaatgtttattgagtgtcaaactgttttagacgcttgtattttaactcattgtgtcctcccactactctgtaagggagataccatcatcatcacyaccatcatcatcatgctcctggtgaaacagacaggacattgagacatagggaagtaaccatacccaaatttacagaagtagtgaatggaagagttgggat

SEQ ID NO: 14983 - DNA, 201 bp, Homo sapiens
accatcatcatcatgctcctggtgaaacagacaggacattgagacatagggaagtaaccatacccaaatttacagaagtagtgaatggaagagttgggatwtgaacccaaacagtctggccgcagagctcctactttgaacccctgtgctgtgcgatccccccaatgtttggctcagaaatgctgaactgtctcagtatct

SEQ ID NO: 14984 - DNA, 201 bp, Homo sapiens
tatggaaagtgtttttcaatatgacttgtacataccaggtgctcctacaatgcttgacacacttctcaaagctcttaccacacaagagcacctcaagggcraagccacagctcctttatctctctgtgcccagtgttcagcccaaggatgagcccacagtagatcctcagcaagtatttgctgaatggttccttagactcc

SEQ ID NO: 14985 - DNA, 201 bp, Homo sapiens
aggccgaggcaggagaatcacttaaaccaggaagtcagaggttgtagtgagcggagatcacgccactgcactccagcctggcgacagagtgagactactcyatctccccacaaaaaaaagagcttaaagggggtggatggaaggttaatgaagagaacacacgtaaagcacattgcacagtggctaggaagtgcttaatgg

SEQ ID NO: 14986 - DNA, 201 bp, Homo sapiens
agagtgagactactccatctccccacaaaaaaaagagcttaaagggggtggatggaaggttaatgaagagaacacacgtaaagcacattgcacagtggctmggaagtgcttaatggaaacttggaaaaggtgggaacatggaacaaggggcagctctgggctggttataagaagtatggtactttgagaaaatcgctcctt

SEQ ID NO: 14987 - DNA, 201 bp, Homo sapiens
ggactacaggtgcccgccaccacgcccagctaattttttgtatttttagtagagatggggtttcacctgttagccaggatggtcgctatctcctgacctcrtgatccgcccgccttggcctcccaaagtgctgggattacaggcatgagccaccgcgcctggctaacggaatcccactttcaaaaatttaccctgaagata

SEQ ID NO: 14988 - DNA, 201 bp, Homo sapiens
tcagctttgcgtgatgactgagtttccccatcagcctctccacactgtatccccagggcccagcacacagtaggaattaaaaaaatcatcagatgaggccrggcatcgtggctcatgcctgtaatcccagcactttgggaggctgaggtgggcagatcacttggggtcaggagttcaagaccagcctggccaacatggcaa

SEQ ID NO: 14989 - DNA, 201 bp, Homo sapiens
tcttgagcactatctcctttgcatcctggcctgaacacagcacagagcaggcatttttgtttgagaagtgtgagtggttttcccactcacctaggttgtgmattgagcaatcagaccctgtctctcagagatgcttgcctttgggctaaaagaggctgggtagcagcctggcccacagtgaggtttgctcatcacaggtgc

SEQ ID NO: 14990 - DNA, 201 bp, Homo sapiens
gggtgcatagatcagtggaacagaatagagtccagaaataaacccacacaaatatacccaagtgatttttggcaaaagagcaaaggcaattcactggagawagggtagtcctttcagcagatggtgctagaacaattagctgtctatatgcaaacaaatgaacctcaatctcacactttatatgaaaactcaaaataaatc

SEQ ID NO: 14991 - DNA, 201 bp, Homo sapiens
ataaacccacacaaatatacccaagtgatttttggcaaaagagcaaaggcaattcactggagaaagggtagtcctttcagcagatggtgctagaacaattrgctgtctatatgcaaacaaatgaacctcaatctcacactttatatgaaaactcaaaataaatcatagactaaaatgtaaaatgcaaaactataatactgt

SEQ ID NO: 14992 - DNA, 201 bp, Homo sapiens
gcaattcactggagaaagggtagtcctttcagcagatggtgctagaacaattagctgtctatatgcaaacaaatgaacctcaatctcacactttatatgaraactcaaaataaatcatagactaaaatgtaaaatgcaaaactataatactgttagaggaatatataatacaaaatctatgtgaccttgggttagacaaaa

SEQ ID NO: 14993 - DNA, 201 bp, Homo sapiens
tgtagcaaatgtgtatttttgcgggcttcatattatcattttttcctattgtgattcaaaatctataatgttgtcccttctgctgtcagagaaaaaaatgygggaaggagaaactacaaaatgtctcctgagcatgcttgtgttttcattttccttgagcagcggggcttggagagagctgtttgatggcggcagaggggg

SEQ ID NO: 14994 - DNA, 201 bp, Homo sapiens
catatccaaggggccctggaagggaaagtacaataaacagcaggaatataaaatgctttactgcggaggggattgaagatagaaaggactttactgaaggygggcattttatgagcaaataaagcctttgattgcctgcaactgagaggcaaactaaagtgagtggaaacttctatggaatattttttctctgccttgttt

SEQ ID NO: 14995 - DNA, 201 bp, Homo sapiens
tgtttctctatgcatatttttgcattcatatagaatacagatgaaatcctgttagctatgtggttttgcagcccacgtttcccacttaataacagcccacrgacatctttccacattaataactgcagatcttgatcatcgtcttttcacagctgcacagtcttgggtgcattacatctcccgtgcgatcaggctgtttcc

SEQ ID NO: 14996 - DNA, 201 bp, Homo sapiens
taataacagcccacggacatctttccacattaataactgcagatcttgatcatcgtcttttcacagctgcacagtcttgggtgcattacatctcccgtgcratcaggctgtttcctcagcagcattgctaaggcatcttctccccacctggctttccacgttcagccacatgggccttcctctgcacactggaacacttct

SEQ ID NO: 14997 - DNA, 201 bp, Homo sapiens
actttctctcctctatcctctccacgcatcgtaacaaaccctgaggtcagggccaccacaggccatcagcagtgtttgcaaaacagcagcacgacaagttygggctggcctgctgcccacactgcgtaggcggccaccccgctgctgctgtgagctgtgaatttagaggtacagcagccagggagggctccccagctggga

SEQ ID NO: 14998 - DNA, 201 bp, Homo sapiens
cgggactactcagacactttgctcatgctcttcacgccacagtggccacgttcacctgaggcttcagtcggggggtgactgttcgcgccccggggtctcarttaggctccatctgccctccttaggatcaaggctcaggccaggtcacggcagccaccaccctgcttccccaggggtctcctgtcacctcaggggtctccc

SEQ ID NO: 14999 - DNA, 201 bp, Homo sapiens
cacctcaggggtatcctgtcaccccagggatctcttatcacctcaggggtctcctgtcacctaagggtctcctgtcacttcaggagtctcctatttctcckggggtctcctgcctccccaggggtctcctatcacctgggggggtctatttctcctgacgtctgctgtctccccaggggtcttctgctctgccatccatcc

SEQ ID NO: 15000 - DNA, 201 bp, Homo sapiens
ttactatgtccaggcactgtgctctgtgcttataagccttgattattaatcctcgaaacagcctcacatggctggcatgaccatcctccaatcatggatgsggaagcttaagtgactcatccaaggttaagtggcttgcccaaggtcacacagtcacgaagtttcaaaaacaagcttcaaacccagtgctgctgagcccaa

SEQ ID NO: 15001 - DNA, 201 bp, Homo sapiens
ggataatattaaaaaacaaactgtctaacaagaagaaattagttaaataaatcatgtacctcttcactacgatatattatgcaatcattaaaaaatcacastgtagaaacatttatcaaggtgggaacacagtcatcatacatcgcttggtgtaacgaataggctagataacgatgctcagaatggcagctttgggaagaa

SEQ ID NO: 15002 - DNA, 201 bp, Homo sapiens
ttggcgtttttctgaagttttcaagttttaaaaattaagtccaggctcagcgtggtgactcacacctgtagtcccagcagtttgggaggtggaggtgggtrgattgcttgagcccaagagctcacgaccagcctgcgcaacatggtgaaaccccacgtctacaaaagaaaaaaaaatacacacacacacacaaatatatat

SEQ ID NO: 15003 - DNA, 201 bp, Homo sapiens
cagaatacctgggttcaaatcctagtcccaccacccctgactgtgtgcccctgactgtgtgcccgtgatgggtcacctcctcttccaattctcagagtccyctcccgggggggtatggtgaagtgtcagtgggggatttacatgaaacccacacagagcttgtgatgtcacagaagattcccagtggtggtgatatttttt

SEQ ID NO: 15004 - DNA, 201 bp, Homo sapiens
acacattgtctgcataatcatcagtatccccattttagagatgaggaaacctgaacagagaaggtaagtaacttgtctgctactttactattattcccatyacaatttcactgaagaggaatctgagaatcagagacgttaggaagctggttcaaggccccacagctagaaagtggcagagccagtcttggaaacccaggg

SEQ ID NO: 15005 - DNA, 201 bp, Homo sapiens
caagtgacaaactcttggcaattttggaaaacaaagtgatgaaaatgatacctacttgaacttcacagggtgattatgaggcttaactgagtttatacacrtacactgaaaacagtgtctggttcattctaagccctctatcaaaggttattatcatacaatgagcaacaaagaaaaaaaacaccaagaaatgcattatct

SEQ ID NO: 15006 - DNA, 201 bp, Homo sapiens
gcactgctcagagaatgtatggatgcatgtctctacttgacgatggaacaggctgaaatacaccactctcccttgatatgtaggtctcagaccgccccccraccttagtaaggtgaagtctctgggtggttcttaaaaggccctcaaatgtcaagtacaaaatgtgacatctgccacactttctagtaagcggactggctg

SEQ ID NO: 15007 - DNA, 201 bp, Homo sapiens
aagtcttttgctaataaatatttcatagtcattggaagtgtctctcctttccctttatctgctggaatgtacctttaaaagcaatggagatgaatttgagrtgcctttgccatgggacatacagaaaaataaagctaatgtttattgagtgtcaaactgttttagacgcttgtattttaactcattgtgtcctcccactac

SEQ ID NO: 15008 - DNA, 201 bp, Homo sapiens
aattcccttacctctaaaacaaggacagttgtgctgtcatcagtgttattgcaaatattgattttgctcttatatggaaagtgtttttcaatatgacttgyacataccaggtgctcctacaatgcttgacacacttctcaaagctcttaccacacaagagcacctcaagggcgaagccacagctcctttatctctctgtgc

SEQ ID NO: 15009 - DNA, 201 bp, Homo sapiens
agcccacagtagatcctcagcaagtatttgctgaatggttccttagactcctccctctcccattcttgtattacatatgggacgctcaggggccagagaasgttgctgtcttgcccatagccctgccggtagccagtggtgcctgtcccaggccttttcctccaggaaaatgtgttgagtgattgcagagggctaagcact

SEQ ID NO: 15010 - DNA, 201 bp, Homo sapiens
cagggagctgatttgtgggctggaaagaggcagagcagtggaagcgaccttatcaggcatgtcgtgctgtaatccaattgctacgaagtctgttaagagcrtcttaaatcaggggattaggtattggttacactgggacactcactccaacaccagctctgttctgattagagaagcccctagcaaaatcatccttgccat

SEQ ID NO: 15011 - DNA, 201 bp, Homo sapiens
gggcaagtcctgtgcagaggaggtccctggggtgggtgcggtgcccgctggcgggctgcggttctgtggagccgagaagacagtgcccgagcaggaaggcrtggaggaaggtggctggaggtcctctctccccagcttccttggctggcctagtgggaggtcgttgccttgggccagaggtggtgggcgaggcagtggctt

SEQ ID NO: 15012 - DNA, 201 bp, Homo sapiens
cctcattccctgctactaactgcatcctggggacatggcaggtggaggtggagggttgggagggtgaggggtagacgagggatgaatatccagccctgtcrgggaggcctgaagtggagcaaatggcagacgggtcggagcccagccctctgagcccagccctgccagactccatctgctgaatccagacgctcaggagtc

SEQ ID NO: 15013 - DNA, 201 bp, Homo sapiens
gttcaaacaggctctgacctccatgggcttggctctgtttggtggaaagagcttccagcaatcccaagttgtcacaggggaaggcaggtgttccataaacygctacagagacagcaaagcactggctgagaggaatggtcctattcaggctccaggtaaagctgtggccggcctgagaggctttaatgcctctgggcaaac

SEQ ID NO: 15014 - DNA, 201 bp, Homo sapiens
gctccatcccaaatctactgaggcagagtgtacttttccaaaaatggccacagcaatatttcgagtttcatgtgccccctagggccctgtcatgccatcayagagtaggtcaaattgtgttcccccaaaaatatgtccaagttctagcccccagtacctgtgaatgtgacctaatttggaaatggggtctttgcaggtgtc

SEQ ID NO: 15015 - DNA, 201 bp, Homo sapiens
atcaccttccggctccttgggaaagaggttcatcatcaatgtcaattcatcagctatctgagcatcgcagatgtaactgcagatcagtcttgccacaagcmaatcgcttagacaattacagctaccatttctttttggttgcttatcatgtgccaggcactgggctagggattttatatgcattagctcatgttgtcttga

SEQ ID NO: 15016 - DNA, 201 bp, Homo sapiens
gctaccatttctttttggttgcttatcatgtgccaggcactgggctagggattttatatgcattagctcatgttgtcttgacaatatagtacctaggatayaggtggtactattattatcattattatcaaaaactggaatctacaggagcttgggaagcactgctcctctatagtctctacgaaggaagcaagagccaac

SEQ ID NO: 15017 - DNA, 201 bp, Homo sapiens
gaagcactgctcctctatagtctctacgaaggaagcaagagccaactctgaggcttaggacttgtggacccgcccaggagtgagaggtggctactgcaccycagggataggcactcccgagggcatggctcattagaaaaaacccactccagcaaaaggggctggtggggaggcaaagcccagttatctgagctggacctc

SEQ ID NO: 15018 - DNA, 201 bp, Homo sapiens
gaggctggaaggctgggggaattccccaggcaaagatgggggaaggaatgaagagatcgtggggccagagggcaggtccactccctgccaccctctccacmtactcaagacctgtcctttcaaccagacctggtcttgaaggctgtgacttccaggacatctgcctggatctcccagttcccagccactggcataatgata

SEQ ID NO: 15019 - DNA, 201 bp, Homo sapiens
aggctgggggaattccccaggcaaagatgggggaaggaatgaagagatcgtggggccagagggcaggtccactccctgccaccctctccacctactcaagrcctgtcctttcaaccagacctggtcttgaaggctgtgacttccaggacatctgcctggatctcccagttcccagccactggcataatgataaaacagagg

SEQ ID NO: 15020 - DNA, 201 bp, Homo sapiens
attatctcatttgatcctcccaatgaccctgtgaggcaggcactaggactgtcccttgtcacatcgattacacctgaagttcagagagggaagagacttgyccaaggtcatctgaccgttctacagaaggtaaggtttctaacccaggtctgggtcaccccaacgcccatactacactgtcccaaccccagaaatgaacag

SEQ ID NO: 15021 - DNA, 201 bp, Homo sapiens
ctgtggtcttaagaaaaggacgtcagtggaaagagagagtgacccagaatctctagaaggttaaggcaagcagagccctcaggataaggctggaaaccagygctcctgggagggaatgcaggcacccgagaacttggctgggggaactgttacatcttcatttccattaacctctaactgaaaggccacgtttcctttcat

SEQ ID NO: 15022 - DNA, 201 bp, Homo sapiens
catgcagcccagctctacaggctgcagcagggaaggagcatttgatttttacaatcaaagggaagacaaagaggtaaaaacacaaatcagttttgtttttrcaggaatcacactctgggaaatggtgtacatttaatccagcccctcattctgaaagaaagaaaactagggtgagaggtagaggaggggtgtcactggtcc

SEQ ID NO: 15023 - DNA, 201 bp, Homo sapiens
gaaaactagggtgagaggtagaggaggggtgtcactggtccaaggcttcctgggcagttggggcaaagctggaccagaatccagtctaccacctgcttcargctgctctgtagacctgcaagaatcaagttctcaagctcaagtccacagccttcacagacacaaacagtgaccagctggaagataagatggaaggaaggg

SEQ ID NO: 15024 - DNA, 201 bp, Homo sapiens
tggaccagaatccagtctaccacctgcttcaagctgctctgtagacctgcaagaatcaagttctcaagctcaagtccacagccttcacagacacaaacagwgaccagctggaagataagatggaaggaaggggaaacctcatttatagtagcaacagaagagaaaaaactaccaaggaataaacttaacaagaaatgttaa

SEQ ID NO: 15025 - DNA, 201 bp, Homo sapiens
tttagcctgggaggcgaaggttgcagtgagtcgagactgtgccacagcactccagcctgggtgagtgagtgagacagattgggtgctgggtgagtgagacrgattgagatcctgtctcaaaaaagaggggaaaaattgcaaaataaagctacatcaaggtaccatttctcatctatcagattgagaaaaaaatttaaaact

SEQ ID NO: 15026 - DNA, 201 bp, Homo sapiens
atttttacaaaaagaaacaaagaggaataaaccaaaaacttatttggttgcctttaaggagcaggtgagaatgggtagaagggacatggggagtcgtactyggagtgtacctttttgtatagttttgatgttttagtacttagaaagtaaaattaaatcaataaagatgggggaaaccctattcaatgccagcaaaaacaa

SEQ ID NO: 15027 - DNA, 201 bp, Homo sapiens
catcccattccctggaagggactcaccactaccgaattctcattctcctatcaatggacatttagggtgtttctcattttttgctagcaccatcacctgcratgaacatccttgtatgtgccatcttggggcattcatgcatctaattccctaaactagagaaaaatggaattcctgaagccataggcagtgagtctttat

SEQ ID NO: 15028 - DNA, 100 bp, Homo sapiens
ggaggagcaggctcggcacctgctgaacgagcaggaacacgccaccatgkcctactacctggatgagtaccgtggcggcagcgtctctgtggaggccctc

SEQ ID NO: 15029 - DNA, 201 bp, Homo sapiens
taacataggtattatctcacagggtagttctgatgattaaattagtgtgtgtgtgtgtgtgtgtagagtgtgtgtgtgtgtgtagagtgtgtgtgtgtgtwgtgtgtgtgtgtgtgtgtatatatatatatatatatatatatatatatatatatatatatatatataatatatatagtgtttagcacctggaacctaggt

SEQ ID NO: 15030 - DNA, 201 bp, Homo sapiens
catcgcgcaagggctttgtttccttaagtatgcccctcaatagctttcgctttcgttgcgctaagggcatcaattttaatcttccctttaacacactttayatcatccctgcagtttagttaaaggaacgggcatccaagagaccagctacggaagggcatccttctgtatgcaagcctctttctatgggtccaggccagg

SEQ ID NO: 15031 - DNA, 201 bp, Homo sapiens
tctcacaaggcagaacctaaccagaaatgctgtggatggacccggcaaggctaatgcacactgactcccaatatggtctatgcttccttccggttctctcytctgacattggcagatccgttgttagtacctgcttactctattcaccacacaggaagcctcaatgaaggcctgctctaacccagccatcaatcaaaactg

SEQ ID NO: 15032 - DNA, 201 bp, Homo sapiens
gctgaggtctgccatattgcttcaccacaagacgcttgcagctgagatgaagacattgacccaaggagacactcactaagcactaggattaacaataaacrtagcctgtgttagggactgaatgtatttccctccagatccatacgccgaagccctatcctcaatgtgatggtactttggagatgaggcctttagggggta

SEQ ID NO: 15033 - DNA, 201 bp, Homo sapiens
caacagtagaatcctcttggtcagttctataaataggccagcagcaaccttgcgaacggagaggttaatgcccttgatgagaacaccacagagagccagcrccggagagggcctgggccaagtcgctgagtctcccacaggctgcccacccccagtattttacagaaggggaccctgaagccccaagatgggaagggaaac

SEQ ID NO: 15034 - DNA, 201 bp, Homo sapiens
tgccaaacagatcagaggtctaaaggaaaaatgtatttataggcattaagagaaaaaatagataagttcatctataccctgggcataaggaaacatgtaamctgactcaaattcaataaaagaaaggattaataattaaattagatttaaaatgtataaaacttttgtattaaaaaaactctataagcaaagtcaaaagaa

SEQ ID NO: 15035 - DNA, 201 bp, Homo sapiens; identical to SEQ ID NO: 14562

SEQ ID NO: 15036 - DNA, 201 bp, Homo sapiens
tgggttcttacagtcctgagcctcctacctctgctggaagcccagatcccattgtgtgccaacctagtaccggtgcccatcaccaacgccaccctggaccrggtgagtgcctgggctagccctgtcctgagcacatgggcagctgcctcccttctctgggcttccctttacctgctggctgtggtcgcacccccactccca

SEQ ID NO: 15037 - DNA, 201 bp, Homo sapiens
tcagctcacttgatccacagcctggcacctccactgtctggctagggagcctcgaatgggtcccaaggccaccctgctcctcagttacatcatctgcatartagtggtggttgtgaggaattcaggagctgcagcataagggccctgcaggtactatgtgctcagtaaatgccagtggttcttaagggtctgagctcccat

SEQ ID NO: 15038 - DNA, 201 bp, Homo sapiens
aggcgtggtggcgcgtgcctataatcccagcttctcaggaggctgaggcaggagaatctcttgaacccgggaggtggatgttgcagtgagcagagagtgcmccattgcactccagcctggacaacagagcgagactccatctcaaaaaaaaaaaaagatgaaccttttaggcaaagctaatctgaggtgtcagaagtcaga

SEQ ID NO: 15039 - DNA, 201 bp, Homo sapiens
ctcagatcctagaaccagctgacatccagtagcaaccaacacacccaggctaagtcaggatttgaaagcaggccaggaagaaatgataagcaaagcaacartaagaaatgaacaagtgatgctattccccacaccccgacttgctggtttggttctgaatggctcgggcacagggtcagtggtgttttctccccatgctct

SEQ ID NO: 15040 - DNA, 201 bp, Homo sapiens
ccttttgggaccgccttaggggacagaacatggtattcgtggcctggggaaagaaaccagaactgtcagtatcagccctgtggatggatgcaaaatagagsaagattctggaataatgatctcctcttcctccaaatggttttaatagtttctgtctctctctcacgtgtgcacacggtgagtgtgcatacacacatcatg

SEQ ID NO: 15041 - DNA, 201 bp, Homo sapiens
agggttagcacatggactgtgtgaagcagacaatgcccagtgcttagcaccggaatcagggtctagcaggtgctccctaaatggcaggtgctgtttgctaytgaaagtactggaaggctgggcgccatggctcacgcctgtaatcccagcaatttgggaggctgaggtgggtggatcacctgaggctgggagtgcaagatc

SEQ ID NO: 15042 - DNA, 201 bp, Homo sapiens
gctgacatcctgcaaatgtggagccctgaggtggagccaagcccgaggcacagcccactcagtggcacaagccacaaagggccggcctcaccccaacctgrgtgctcgtgattgacagcctcttgttacgtgagggaagcagcaccccttccgtggcagaaaagttgggcctgaattgtttgagcaattccacgtgtgcag

SEQ ID NO: 15043 - DNA, 201 bp, Homo sapiens
cctggccttggccttcccatgggtggaaccgggagggttggctttaatctccaccagactcttgccccgggactgtgatgggcgattggccacttctcctygataacattactgtttttcttccgccttctggttgactttagccagaaccagtgcttctataactccagttacctgaatgtccagcgggagaatgggacc

SEQ ID NO: 15044 - DNA, 201 bp, Homo sapiens; identical to SEQ ID NO: 14584

SEQ ID NO: 15045 - DNA, 201 bp, Homo sapiens; identical to SEQ ID NO: 14585

SEQ ID NO: 15046 - DNA, 201 bp, Homo sapiens
caactgaaacttgcaataggtaaaatggttggaaacaatagcagtgtcccgtaacaggtgatcattgaaagaaattgtgatagttccactcaaaggaatawtattagctgccgttaacagtcatgctattgaagaatatcaaataatgtaaaaattttgttatgttaagtggacaagccagttataaaataatatatatct

SEQ ID NO: 15047 - DNA, 201 bp, Homo sapiens
ggaatctaaattgtatttatgaccaccgttatctaaaactccaaattccaaaggatatacaccaataggactctataaagggtctcccctccagcccccaytttttttaacagggtttccaaacttttggcaactattttgtaattttgtttaaaggcgataaaaaagaaaaggcctttttctgcttgctgagaggcagga

SEQ ID NO: 15048 - DNA, 201 bp, Homo sapiens
ttctggttgggtctgtctagtgggagggacctatgagagatcacagggtgggaagagagagacttgagagtgggcacagctcccggctaatgctactaccyggggattcctcagtctttgttgggtcccctgatgctgcccacacctttgctgacagttctctcctttgacgcctacactcccagacttgagagccccacc

SEQ ID NO: 15049 - DNA, 201 bp, Homo sapiens
aatacactctcactattatctccataaggaccctttacatgagagactctggatcctcattcttgatttgcaaaactgtgggcttcagaaaattagccacyctttccccaaatccttatagactatcgacaccgataatgttatcatcaccatcacattattgagaatgtttactgagcattgaggctctgggctaaagca

SEQ ID NO: 15050 - DNA, 201 bp, Homo sapiens
ggaccccaggggcccatcccatctgtccttccaggccttccaccccagcaggtacctgcgaggatcaaatcttccaggcgtccccttggagccggcaagcrgctgggcagggtgttgctcccgacaagccttcaggtactcctcctctagggccgcgtgggcagccttcagccgctggaagccctgaaaccagaccaggcc

SEQ ID NO: 15051 - DNA, 201 bp, Homo sapiens
cattagagaaatcccacccccatctagcctcagtttccccatcatccaataagggtttcaaggcatcttctcagcacgtgggtccaaagggactcaaatcwcagcttttgatcgtgccaccatttggatatgtatactaattaggataagatttctctctattccccgtgtacaaattataaggacaaagtgcctccctcc

SEQ ID NO: 15052 - DNA, 201 bp, Homo sapiens
ccaccaggagcccaagatggcagctacatcaggcaggtccaggaacagagtatcagagcagagactccaggggatgcccccttagggtccatttaatatcrgcctttagatgatggtgagaactcaaaataagcaagatgaaagaaggttccattgggaatcaggaggtctcagcccaagtcccctctgccatccacaggc

SEQ ID NO: 15053 - DNA, 201 bp, Homo sapiens
ctcagtcatgttactcctgctactctcacagaaccccataattctccttcagtgcactgaccaaaattataactaaatcactgtaaccagttcaactctamagaaaactctgtgaaggtagacgccaccttccctgccacctcccatcccactgaatccctaccatgtgtcatggtacatggcacacacttcataaatatg

SEQ ID NO: 15054 - DNA, 201 bp, Homo sapiens
aatccagcagagtttaaggccatgctctctacgtgacccacaagcccctacatcatggggcccctgcctgcctctccagccacatctcagactatttttcytttctcttcccatactctagccacagggcctttgcacaagctgttttccctgctggatgggttttctctttctgtctctagtaattcctacttagtctca

SEQ ID NO: 15055 - DNA, 201 bp, Homo sapiens
tgccctgccacctccccagcctcagactggcctacccacaagtcatcttatgtcatcccctgccagaaaatccagcagagtttaaggccatgctctctacrtgacccacaagcccctacatcatggggcccctgcctgcctctccagccacatctcagactatttttcctttctcttcccatactctagccacagggcctt

SEQ ID NO: 15056 - DNA, 201 bp, Homo sapiens
acaaggagcagagttgagatttaaacctagatttcctgccagagttaactctcctgacccccatccattccagcatggccaccccagccccctgcaatacyttcaactgcaggagcatgagggtcccttaagatattgtactcaggttttctccccattcaagcgtgtagtggcacctggtagagttttcctaccctctag

SEQ ID NO: 15057 - DNA, 201 bp, Homo sapiens
tcttcgatactggctgccatgaattgagcacctgctgtgtgccaggcaccatacagataccatgtcacaacaatcccaccagtacctacgattattacaamccattttatagacaggtaactcacgctcaaatgatttgcccaaagtcaacagaaacaaggagcagagttgagatttaaacctagatttcctgccagagtt

SEQ ID NO: 15058 - DNA, 201 bp, Homo sapiens
acctctgcccagtgggggacagccaagatccagctgctggccagacaccctggtcaggtccaggtggcactcaccgctccatgaggccatggtaaacttgytccatctgcagctccttgtgcctgagtcgggccagggggtcctgtggcctgtcctccacctcactgttgccagagctcacctccacatttacgtgcaatg

SEQ ID NO: 15059 - DNA, 201 bp, Homo sapiens
ggagtttgagactagcctggccaacatggtgaaacccatttctactaaaaatacaaaaattagctggacgcagtggtgcatacctgtagtcccagctactmgcgaggctgaggctggagaatcacttgaacctgagtggtggaggttgcagtgagctgagatcgtaccactacataccagcctgggggacagagtgagact

SEQ ID NO: 15060 - DNA, 201 bp, Homo sapiens
cacctctttccacgtatgcatgtttctggggagagcattaataacttttaacgaatctcccaaagggatgggtgaccaaaggttaaaaaccactaatccgkcccctgcattaaaagcaatgaactggccagacatggtggctcacgcctgtaatcccagcactctgggaggctgagacgggaggattgcttgcgcccagaa

SEQ ID NO: 15061 - DNA, 201 bp, Homo sapiens
gtagcttcttggtccatacaatcaatgggcaaattgcagaaaagatagccctagaaaggacaggcttttctcggaaaagagatgatggagagagagggcakaagtgtcagcaccagaaaggtgaatctttaggtcatattccactggctggagaagtgtgtcctcgatgtctagatcaatgaggtcccacagaaacgctgg

SEQ ID NO: 15062 - DNA, 201 bp, Homo sapiens
cagtagcttcttggtccatacaatcaatgggcaaattgcagaaaagatagccctagaaaggacaggcttttctcggaaaagagatgatggagagagagggsataagtgtcagcaccagaaaggtgaatctttaggtcatattccactggctggagaagtgtgtcctcgatgtctagatcaatgaggtcccacagaaacgct

SEQ ID NO: 15063 - DNA, 201 bp, Homo sapiens
caaggaagtggaactttcttagtagaaaaaatgcacacgaaccaaaaaaagaaaagaaaaactcagaaggcagtagcttcttggtccatacaatcaatggkcaaattgcagaaaagatagccctagaaaggacaggcttttctcggaaaagagatgatggagagagagggcataagtgtcagcaccagaaaggtgaatctt

SEQ ID NO: 15064 - DNA, 201 bp, Homo sapiens
gccggtggccagagaactctaaaacataaacctgcctacgctacgtccctgcttaaaatccccttccctgtcctctcagcctttgtgcactcatggaataygcagtgaatgtctccccttacccatggccttcaggccctgtaggatctcccataggtctctcctctctacccctctcttcctttactgctcaacactcca

SEQ ID NO: 15065 - DNA, 201 bp, Homo sapiens
agtcagccacttgggtatctcagtctctctgatgtaactctttagtttcttactgagtgccagcaggcacttaacattcatctttctctgcaaacttactyccctgtctctgcacatggcagcagcatctacctgactagccagacagaactctgagtcactctagatcccctccttccctgaacatccctgaagttaatt

SEQ ID NO: 15066 - DNA, 201 bp, Homo sapiens
taacccctgaggccctgcaccttgtggatgctcaggaaacagtactgcagtggatctgggctctgagacggagcagaataaagcgctgtgagtggagagcrgacagggagacacctcgatgcttcctagcaccacctgaaccgggagggctgactaagagcaggctggaagctgtctgcaagactatagtaaatcctggtg

SEQ ID NO: 15067 - DNA, 201 bp, Homo sapiens
agaactgatagaaaatgatatttgaatggcccactgggtatatggaaagggcttctcataacagaggagcccccgctgacaccaggagctgcacccatccyggccctccctcctgacctacctgtgtattggccccggaaggtgaccctgtctggccatccagcactgcccacccctctctttccatcccgagctgcctgt

SEQ ID NO: 15068 - DNA, 201 bp, Homo sapiens
gagcatagtggtgaaaaggtgggactctggagtcacaaagacctgggttcaaatcctgcttctaccacttgtaagctgtgtgcccttgggcaagttacttmatctctctgagccttggtgtccttgtctataaaatggacgtaatagtactgcagtacttagttcatagaactgtgaggattaatttatgcaaaaccctta

SEQ ID NO: 15069 - DNA, 201 bp, Homo sapiens
gctggtgctgggggcgctgttgccagataccacagtccggggggtgggcgtggcgacgaccccgcctgcttgctcctctgcttggggctgggagttgaagrtgcttttctcctcgtggtggccttctctgcccctatcagggagggaacagcacagagagacagagtctgaccacttggcagatccagccaaagatggagg

SEQ ID NO: 15070 - DNA, 201 bp, Homo sapiens
tcaatgagttggaacactggcaggcgctttcccccgtgtctgctggaggtctgagcatgcagcattggttctcatctctgctggagtggaagattccttarcgacttgcttagactcagctgagagggcagcaagaaagcaaatttacataccgggcgcggtggctacaccttgtaatgccagtgctttgggaggccaatg

SEQ ID NO: 15071 - DNA, 201 bp, Homo sapiens
cagccatgggttcacacctgggcccgactctccccacatatctaatgtgtgctaattggcaagcagcagatgctgataaaataatctgaactgtatgaacrggcttcttgcatccccaaaacagcagcctgcactccctcctctagggaccgtctggtgtaagtaactacagaggctcctcaaattacgatggggttatgc

SEQ ID NO: 15072 - DNA, 201 bp, Homo sapiens
ttcctcaagccccaccatcccattccttcattcgtaggtactcactgagctcctactgtgtggcgggtgcttttaaatcacctgggaatatggcagggccsaagacaggccagtcccctgctctccactctagcagagacatggacaataagcaagcacatgtataatttcaaggagagagctgtgaacaatgagactggg

SEQ ID NO: 15073 - DNA, 201 bp, Homo sapiens
gaactgcccagacgcccaggctctcctttgccagcacagctacgcagcccgcacagcctccccgtgccctctgcagccccttcccatccagccagagctgkccagggtgccaccctgcttctacccccacccacaccctgacacctcccagatgaagacactgaggcacagagacatggcctgctctcacaagacctcaca

SEQ ID NO: 15074 - DNA, 201 bp, Homo sapiens
caccaggcaactacaaatccaggtgagatgtgctggaggaggcacgggggctgccctgacacaggccagggaagtctggtgatcccagtttagaagccggytcctccaagaatcctctctgacctcactggggtaagaattcagattgagaggtgggggaggatgatgaaaaaagcattccaggccaggtaggagagctca

SEQ ID NO: 15075 - DNA, 201 bp, Homo sapiens
atggcagcagcatctacctgactagccagacagaactctgagtcactctagatcccctccttccctgaacatccctgaagttaattagttaccaagtctcrtgggcccaacttccaaaatacctcttcccaaatgaatcccttcttcccctctgtaggggccctccccgagaacccagtccccatcatctctctcctggat

SEQ ID NO: 15076 - DNA, 201 bp, Homo sapiens
cactcccttcctccctggaagaatgtgtgatggccgggcttatgcctgtaatcccagcactttgggaggccgaggcgggcggatcacgaggtcaagagatwgagaccatcctggccaacatggtgaaaccccgtctctactaaaaaaaaaaaaaaaaaaaatacaaccgggcatggtggcgcatgcctgtaatcccagcta

SEQ ID NO: 15077 - DNA, 201 bp, Homo sapiens
gcaaccagaacacagctattgtagaaaacaagaaatgccaacgttcccattgctaattgggattttaaaaaaccttaaaaatgtccaggcatgacggctcrcatctgtaatcccagcattttgggaggccaaggtgagaggctcacttcaggccaggagtttgagaccagcctgggcaacactgtgagaccctgtctctac

SEQ ID NO: 15078 - DNA, 201 bp, Homo sapiens
ggtccctccagtgtctcccatctcagcagacggcaacaccatcccctctatgcatacaggccagaaggctgggaggcatctttgccatctctctccctctraccccctgaatccattctgtcacttggtcctgtccaatgggacctcctataaagatcgcaaactcatctactgctctgaagtctaccaccactaccttag

SEQ ID NO: 15079 - DNA, 201 bp, Homo sapiens
ctctatctgaccccaacacctatggttctcctattaacagtaattttttattaataatgtgtgttataattatatcataattaatataccatataacatayaattatttcttaacaaatataagcatttctaataattattatactgataataatagcaactaatagctattcgaatgaatgagtgaaccagcaagtaaac

SEQ ID NO: 15080 - DNA, 201 bp, Homo sapiens
ttattaagtcagttactcaaaatccccagctgataagtccttggatgaggatcacaacactgctctatctgaccccaacacctatggttctcctattaacmgtaattttttattaataatgtgtgttataattatatcataattaatataccatataacatataattatttcttaacaaatataagcatttctaataatta

SEQ ID NO: 15081 - DNA, 201 bp, Homo sapiens
aaataccatctttcagtgcagcccttggctaggccaaacacaggtgaagaactgcatgccttttcatttactcttaatggcagtcctgaaaggaagacagkgtggggaccccaacagcccattatatagaagaaaaaactgagacacagagaggttattaagtcagttactcaaaatccccagctgataagtccttggatg

SEQ ID NO: 15082 - DNA, 201 bp, Homo sapiens
tgtgaacctggcggatcaggtaaactttcccttgttgtaagaaccctccaagggttcaccagatgttgggaacagatcgatcctgatggtcagtcgagctrtctttcctcaagccccaccatcccattccttcattcgtaggtactcactgagctcctactgtgtggcgggtgcttttaaatcacctgggaatatggcagg

SEQ ID NO: 15083 - DNA, 201 bp, Homo sapiens
tcttgatatcgcaaggggatatcaccctgctagggtgggttgggaggcagggtatgggactcaaagagctttgaagtccctgattgactcagcttctaagrgcaacagcctcagaactgttaacctctctcctcctccctgaggtcacatttcaaagtacaaagatacatactgagcacccagtgggcgcaaattaacttt

SEQ ID NO: 15084 - DNA, 201 bp, Homo sapiens
gaacatcctgtcttctgggatgactcagtcgtggcagaaatctcactgtaaccaggggaaggtgcacgtcagaggcagctgcagtgactgactagagtttygcacttgcccccaggcgcctaaaccagtgagcctttcctgagccaggcctctgccttccatgcgagccatggccctcctcaccacaaagccccagaactg

SEQ ID NO: 15085 - DNA, 201 bp, Homo sapiens
tgaggcaagagaatcgcttgaacccaggaggcagaggctgtagtgagccgagatcgtgccactgcactccagcctggcaatgaagcaagactctgtctcaraaaaaaaaaaaaaaaaaagaacgtgtgatgttttggggacaggacaccactgtagggggaggggtgtcagtctcaccttctcccgaagtctctcctgact

SEQ ID NO: 15086 - DNA, 201 bp, Homo sapiens; identical to SEQ ID NO: 14595

SEQ ID NO: 15087 - DNA, 201 bp, Homo sapiens
tcaaatatacaaacatcattgatgcacacacattccagaaatgcagaggtatgctgctgccacggggtaggggtgcgggaggcggcctggcctcatggccrcagaccgtgccccagcccgggcctggcaggtagctggccactgataaatgccactgggatcctaggagaagctggggaccatgcgtgaggtactgaaggg

SEQ ID NO: 15088 - DNA, 201 bp, Homo sapiens
agatttgggaaccacccatgtaggagagaaaaaaatctcagagtcactgtggacctgggttcaaatcccagccccatctcctgctggccctgacctttgargcttcacgtctctaagcctcagtttcttcatctgtaaaacagggataagaagagtagccaccccacaggggctgctataaagattcaatgacatgatgcc

SEQ ID NO: 15089 - DNA, 201 bp, Homo sapiens
gccatggccctcctcaccacaaagccccagaactggccagtcagctagtcagtcaacaaacacacgttagtgccaactacctgccaacctcaggctgggaygatgctgtgatagagaagcaggctgggcatcaggagacaggtgctagtcctggctgctgttactcactgtgtatagctgggcttgcattttcctcactgt

SEQ ID NO: 15090 - DNA, 201 bp, Homo sapiens
gtgacagggaatggggatgggccagggaagccaggaagcccttttgtttcagggaccgataaggagtttgaagcagagaagcccaaaacctgagcagatgyccaggcagagcgatgaggtggggagtggcggtgggggtgggggtggcagctgcagctgctccggccaggccctcccagggctggtctctctggacacagc

SEQ ID NO: 15091 - DNA, 201 bp, Homo sapiens
aggagagaagagaagaggagaggggaagggagaggagaggagaggagggaagggaagggaagaataaaatggtggtgcttctgaaagaatttgttttatgrgcatggtagtgcatgtaactattgcatttctcttttggcattggcaactaggaagctcaaagctaaatgtgtgactctaatgtgcttagggtccaacaga

SEQ ID NO: 15092 - DNA, 201 bp, Homo sapiens
tccattccagcatggccaccccagccccctgcaataccttcaactgcaggagcatgagggtcccttaagatattgtactcaggttttctccccattcaagygtgtagtggcacctggtagagttttcctaccctctaggccagagcacagcacaagattttccccaaaccatagggccagcatgacctcagctgtcaggga

SEQ ID NO: 15093 - DNA, 201 bp, Homo sapiens
accattttatagacaggtaactcacgctcaaatgatttgcccaaagtcaacagaaacaaggagcagagttgagatttaaacctagatttcctgccagagtyaactctcctgacccccatccattccagcatggccaccccagccccctgcaataccttcaactgcaggagcatgagggtcccttaagatattgtactcagg

SEQ ID NO: 15094 - DNA, 201 bp, Homo sapiens
actgcatgtgtcctactgaaaatcatgtcccacactacccaaaatcatttcaagggctatcagtggtatacattccacacttgaagaggcaggacaggtargccatgtctaaactgtgaagcgctgtcttattcactctgacagtgatcatccctgtggttttagggtggaaccaaacattctgcaggaaaggctcagtga

SEQ ID NO: 15095 - DNA, 201 bp, Homo sapiens
ggtggcagctgcagctgctccggccaggccctcccagggctggtctctctggacacagccagggtgtcccgggtgctccccaaggctggattcactccctygggggattctgtgaaaggtgaatcaggattctgtgaagggaggactagtgaatttgggaaacattgggttaaacaaatgaatattctctgcacagatgga

SEQ ID NO: 15096 - DNA, 201 bp, Homo sapiens
aggaggaggaagaaaggaaggagacaggataggaaaaagaaagagagagaaagcaaaagaaagagaaagacatgctttaaaatgtttacaacaggccatgygccgtggctcacacctgtaatcccagcattttgggaggctgaggcgggaggatcacctgaggtcaggagttcgagaccagcctggtcaacatggcgaaac

SEQ ID NO: 15097 - DNA, 201 bp, Homo sapiens
caacatggcgaaaccccgtctctactaaaaatacaaaaattagctgggtgtggtgacgtgcacctgtaatcccagctactcgggagactgaggcaggagarctgcctcaacctgggaggcagaggttgcagtgagccaagatcgtgccaccccactccagcctaggcgatgacagtgaaactgtctcaattaaaaaaaaaa

SEQ ID NO: 15098 - DNA, 201 bp, Homo sapiens
gaattataggcaagtttttttgatagggaagtttaccatttttccttttgggtatttttcaaatataacagttgctttaaaaataagaatgaaatgaacaygtactattcttaaaaacaaaacaaacgaataccacctcacctctgtgtggtgcttccttctgaccttgggcacctccgtcttcagttgcccctcctgtga

SEQ ID NO: 15099 - DNA, 201 bp, Homo sapiens
cgagctgacaccagcacaccctgcacaccccaaagtaaggatgcgctaacaccagtgagaagctgtgtgactctcgtcaagtggctttacctctctgaacytcaggctttctatctgtacaagagggacaacaataacacccacttcgacaacatcacgtaactgatataatctagatgatcaacaacaatgttttgagca

SEQ ID NO: 15100 - DNA, 201 bp, Homo sapiens; identical to SEQ ID NO: 14597

SEQ ID NO: 15101 - DNA, 201 bp, Homo sapiens; identical to SEQ ID NO: 14598

SEQ ID NO: 15102 - DNA, 201 bp, Homo sapiens; identical to SEQ ID NO: 14599

SEQ ID NO: 15103 - DNA, 201 bp, Homo sapiens; identical to SEQ ID NO: 14600

SEQ ID NO: 15104 - DNA, 201 bp, Homo sapiens; identical to SEQ ID NO: 14601

SEQ ID NO: 15105 - DNA, 201 bp, Homo sapiens; identical to SEQ ID NO: 14602

SEQ ID NO: 15106 - DNA, 201 bp, Homo sapiens; identical to SEQ ID NO: 14603

SEQ ID NO: 15107 - DNA, 201 bp, Homo sapiens; identical to SEQ ID NO: 14604

SEQ ID NO: 15108 - DNA, 201 bp, Homo sapiens; identical to SEQ ID NO: 14605

SEQ ID NO: 15109 - DNA, 201 bp, Homo sapiens
cgggatacctgatgtgggagagccggtgctctggagtctgggtgaggggtgaaactctgcttgtttctgagcccacaaagccactgtctgtctctggggaygccatccaggtctcctgaaagaggcagtatccctttatgtctgaggaatgtgtccaaggcacactgggaagcccttcccaaatcgtggcctggcctcacc

SEQ ID NO: 15110 - DNA, 201 bp, Homo sapiens
tgcttgtttctgagcccacaaagccactgtctgtctctggggacgccatccaggtctcctgaaagaggcagtatccctttatgtctgaggaatgtgtccarggcacactgggaagcccttcccaaatcgtggcctggcctcacctcccagaggctcacaccccagggttgctggcccagctcccaacagccaggcccagga

SEQ ID NO: 15111 - DNA, 201 bp, Homo sapiens
gggatgaaatgagggcctacgaatggacagaccatcctctcttattctgggccatcacaggcactgtgattcccaggctgtcccaggaatgtggcactgaygggacaatggcgggatcccgggatacctgatgtgggagagccggtgctctggagtctgggtgaggggtgaaactctgcttgtttctgagcccacaaagcc

SEQ ID NO: 15112 - DNA, 201 bp, Homo sapiens
atttatatcggcacagagaacagctcacaggttctacaccaaaacgtcagcactgatggtttccagagtatttttttttcttttgttcccttttgtccacrttatctgtaatttcaaatttcagtacaatgaacctggctaatatgtcatatcctaaagggttctgcaagtttttctatttgatttttcaacccatgcagt

SEQ ID NO: 15113 - DNA, 201 bp, Homo sapiens
gaggtcacccacctgccataatgggagccccaggtggctggggagtctgctggccggccgcgggtccgggcggggcggtcaaaggcagatgctgggcgtgycgggctgccctggagtggctggtgcaggctgtcttccagccgcagacgaagccgggacacctcttcttgcagctcacagatggcctggctggggttggag

SEQ ID NO: 15114 - DNA, 201 bp, Homo sapiens
ttttgaggtcacccacctgccataatgggagccccaggtggctggggagtctgctggccggccgcgggtccgggcggggcggtcaaaggcagatgctgggygtgtcgggctgccctggagtggctggtgcaggctgtcttccagccgcagacgaagccgggacacctcttcttgcagctcacagatggcctggctggggtt

SEQ ID NO: 15115 - DNA, 201 bp, Homo sapiens
caagactatcttctgtagctgccaccaggacagaggtgggagttttgaggtcacccacctgccataatgggagccccaggtggctggggagtctgctggcyggccgcgggtccgggcggggcggtcaaaggcagatgctgggcgtgtcgggctgccctggagtggctggtgcaggctgtcttccagccgcagacgaagccg

SEQ ID NO: 15116 - DNA, 201 bp, Homo sapiens
aaagaaaccagaactgtcagtatcagccctgtggatggatgcaaaatagaggaagattctggaataatgatctcctcttcctccaaatggttttaatagtytctgtctctctctcacgtgtgcacacggtgagtgtgcatacacacatcatgtgtaaaatatgtacatatttaagtatgacacacatacacacatatacgt

SEQ ID NO: 15117 - DNA, 201 bp, Homo sapiens
cattgccttttgggaccgccttaggggacagaacatggtattcgtggcctggggaaagaaaccagaactgtcagtatcagccctgtggatggatgcaaaayagaggaagattctggaataatgatctcctcttcctccaaatggttttaatagtttctgtctctctctcacgtgtgcacacggtgagtgtgcatacacaca

SEQ ID NO: 15118 - DNA, 201 bp, Homo sapiens
ccacccaggtctgaatgctaacatattcagtgatctatagaaagaggctgggaaggtcagaatgaaggctcttacacagcggcaggtggataaggcatgaygggaaccgaggagatgtaggcaaaggctggaggggctggtgctgggggcgctgttgccagataccacagtccggggggtgggcgtggcgacgaccccgcc

SEQ ID NO: 15119 - DNA, 201 bp, Homo sapiens
tgaaggctcttacacagcggcaggtggataaggcatgatgggaaccgaggagatgtaggcaaaggctggaggggctggtgctgggggcgctgttgccagayaccacagtccggggggtgggcgtggcgacgaccccgcctgcttgctcctctgcttggggctgggagttgaaggtgcttttctcctcgtggtggccttctc

SEQ ID NO: 15120 - DNA, 201 bp, Homo sapiens
cgtggcgacgaccccgcctgcttgctcctctgcttggggctgggagttgaaggtgcttttctcctcgtggtggccttctctgcccctatcagggagggaayagcacagagagacagagtctgaccacttggcagatccagccaaagatggagggtccacccagcccttcccctatgagagctggacaggccctaccctgtg

SEQ ID NO: 15121 - DNA, 201 bp, Homo sapiens
acgtctttgtctgcttccagatgtgttccttgggctgagggcagaagaatctggtcgtttctctcctccatctatctgtggcatgctgcggactctgggcygggggagctgaggagtcctggaattccatgggggttgcccgagcaacactgcctccagttctgccatctgggcttaggaggtggtggctggggccctctg

SEQ ID NO: 15122 - DNA, 201 bp, Homo sapiens
tggagccaatgaatcgggaagggagtggcttaggtgacgtctttgtctgcttccagatgtgttccttgggctgagggcagaagaatctggtcgtttctctyctccatctatctgtggcatgctgcggactctgggctgggggagctgaggagtcctggaattccatgggggttgcccgagcaacactgcctccagttctgc

SEQ ID NO: 15123 - DNA, 201 bp, Homo sapiens
cagaggcctgggggtcctcggccgggcccggccaccactctgcagagcggggctgtgggatggtgaaggacaagaccttggtcccctggggcaccattccygtgtggatgctgtggttgggctggggtgggtcagagaacaggttcacctgtggaagcagggaggcacagcacagccaagtcagggtaggggcaaacccac

SEQ ID NO: 15124 - DNA, 201 bp, Homo sapiens
aggcagaaggagcctccagctgcagctcttctcccggactcacctgaggccgcagaggcctgggggtcctcggccgggcccggccaccactctgcagagcrgggctgtgggatggtgaaggacaagaccttggtcccctggggcaccattcccgtgtggatgctgtggttgggctggggtgggtcagagaacaggttcacc

SEQ ID NO: 15125 - DNA, 201 bp, Homo sapiens
accttggccaggaactggctggcctgagaagccagtgcctgggtctgctctgctgaggactggtcctcagagatgtcccggttctccggaagccaccccasggtgggcatgctggtaagcgaggaggggctcaagtctcctcgagctgatggccaccctggaatacacaactgctgaaagctggggccaagaacagtcctt

SEQ ID NO: 15126 - DNA, 201 bp, Homo sapiens
aaccgctagggaggcagagagagaacccaaagtgagtttaagcagagagaacttccaagctcacacttgtgcaggtggaatgatgggggaagtgaagagayggtgcctagttcaaggtcacaaaggaagttcctgatgaggccaatgacccacactgacctccaaaccagaagatctagattttgctgggagtgtggggtg

SEQ ID NO: 15127 - DNA, 201 bp, Homo sapiens
catcttctcagcacgtgggtccaaagggactcaaatcacagcttttgatcgtgccaccatttggatatgtatactaattaggataagatttctctctattmcccgtgtacaaattataaggacaaagtgcctccctcctggagactgagggaccccaggggcccatcccatctgtccttccaggccttccaccccagcagg

SEQ ID NO: 15128 - DNA, 201 bp, Homo sapiens
tttaagatcctttgcaaaccaatggtagaagcctgtatgttggagaggtggtaccttcaactatgtcccccatcaccgcagaggtggcacatggcagggakctgatggagctgaactgacatcatttagcatcccgagcctcctctctgggcctcattttcctcctctgtaaaacggggagaaaggccctgacagccacag

SEQ ID NO: 15129 - DNA, 201 bp, Homo sapiens
ccactaacatttttgagctcttaccacgtgctcagaaaaaatccctaagaagacactgagagaattagatgaggaaacataagaacagagacctcaaatastttccccaaggtcacacagcttataattagaactagaattggaactccaggctggcttcagatctgcctctctctcacgccctctttaagatcctttgca

SEQ ID NO: 15130 - DNA, 201 bp, Homo sapiens
gtatcagcgggaggcggtcccagtgggtcccctgtgacagcaccacctagaagaggaggaagagatgtcaggggaggattacatctaaatcatcagatcargagcccccatgcaggccttctgcagcactgagctctcctcgggacccactgcggaggggacaagctgcctccatctgggtgatgacattgacaacaacca

SEQ ID NO: 15131 - DNA, 201 bp, Homo sapiens; identical to SEQ ID NO: 14717

SEQ ID NO: 15132 - DNA, 201 bp, Homo sapiens
cacgagggaacagcccaatatggttgagccaagaggtacctcagggcaggaggtcttgatggctggcatgggggcttgtccagaaggagcaggcaggtgcrttggctgatggaggcagggcagggctggggtgctgtccagagctgagtctgacccgggcggctcaggctcttgctgggtctggtctatgtgttccttcag

SEQ ID NO: 15133 - DNA, 201 bp, Homo sapiens
agcccaatatggttgagccaagaggtacctcagggcaggaggtcttgatggctggcatgggggcttgtccagaaggagcaggcaggtgcgttggctgatgraggcagggcagggctggggtgctgtccagagctgagtctgacccgggcggctcaggctcttgctgggtctggtctatgtgttccttcagctcttccaggc

SEQ ID NO: 15134 - DNA, 201 bp, Homo sapiens
gcttctgtggaaggcgctcagagatgccgcttccctccaggctggtcatactactttggtgggatgctgcggacttggtgcctggagggtggggtggcacrccagggcctggaggggctgcctcagccttgcccaggcctgacatgtgcccgtctctagccagggatgcctggaaacctggtggcttcatagataccatct

SEQ ID NO: 15135 - DNA, 201 bp, Homo sapiens
aggaagacctggctcgctgccttcctggagggacaatctgctcttcacctctaggctcaccaggcaatctctctgtggatttactagcaaaaggaaagagwgatgatgtcattggatgaggttttgtgtggcctttaaaggttatttgtgagaagttcaacctggagaaatgcttctaacacgatggaaggaagagagtat

SEQ ID NO: 15136 - DNA, 201 bp, Homo sapiens
atgctgggcgtgtcgggctgccctggagtggctggtgcaggctgtcttccagccgcagacgaagccgggacacctcttcttgcagctcacagatggcctgrctggggttggagtggagacagaaacaaagaacagaggcatgaggaacagagctgcagccacccgagtatgccaggatgcggcagcctttgtcccttcaca

SEQ ID NO: 15137 - DNA, 201 bp, Homo sapiens
ttccacacttgaagaggcaggacaggtaagccatgtctaaactgtgaagcgctgtcttattcactctgacagtgatcatccctgtggttttagggtggaamcaaacattctgcaggaaaggctcagtgacttactccaggggagccccatgacttttctcagcctgcaccgggcactgccttgggaggaccctggtggcct

SEQ ID NO: 15138 - DNA, 201 bp, Homo sapiens
acagagtctgaccacttggcagatccagccaaagatggagggtccacccagcccttcccctatgagagctggacaggccctaccctgtgagactccatgtyggggaggtctctctttggggaacaaatcctctgccccagttgctctgtcccagactggaacaacagctgctccagttaaactcacccaggtctaataacc

SEQ ID NO: 15139 - DNA, 201 bp, Homo sapiens
gcgattggccacttctcctcgataacattactgtttttcttccgccttctggttgactttagccagaaccagtgcttctataactccagttacctgaatgyccagcgggagaatgggaccgtctccagatacggtgagggccagccctcaggcaggagggttcaccgtgggaacagggcaggccagcataaggtgggggct

SEQ ID NO: 15140 - DNA, 201 bp, Homo sapiens
gataacattactgtttttcttccgccttctggttgactttagccagaaccagtgcttctataactccagttacctgaatgtccagcgggagaatgggaccrtctccagatacggtgagggccagccctcaggcaggagggttcaccgtgggaacagggcaggccagcataaggtgggggctggatgtagagccctggaggc

SEQ ID NO: 15141 - DNA, 201 bp, Homo sapiens
ccttgctccccctgcagctgacaagccagagacgaccaaggagcaactgggagagttctacgaagctctcgactgcttgcgcattcccaagtcagatgtcrtgtacaccgattggaaaaaggtaaacgcaagggattggacagtgcccaccttgtccatggcccaacttgggcagccccagaggcccagagcaggagagct

SEQ ID NO: 15142 - DNA, 201 bp, Homo sapiens
cccattccaatgcacccccatctcagcttctggccagaagacctgagcaagtccctccttcttcctggccttggccttcccatgggtggaaccgggagggytggctttaatctccaccagactcttgccccgggactgtgatgggcgattggccacttctcctcgataacattactgtttttcttccgccttctggttgac

SEQ ID NO: 15143 - DNA, 201 bp, Homo sapiens
gccacagtctgtgtgaggctcctgagatctcatgtacagaaagtgcttggcgtggagctgggcacgcagcaggggctgggcacacggtggcccaaaggagrcccgggccttcactgatgggctttgtggccccggacacacctaggactcctcacctgtaagacaggcaccattgtgccatcccatgttctcacccagagg

SEQ ID NO: 15144 - DNA, 201 bp, Homo sapiens
tcttccagagggaggccgagaacatgttgctcacctgctgttccttagggacaccaagaccttgatgtttggttcctacctggacgatgagaagaactggsggctgtctttctatggtaggcatgcttagcagccccaaactcatgcccctctcaggcctcaccccccattcacccacccctgggctggcccctagaaccc

SEQ ID NO: 15145 - DNA, 201 bp, Homo sapiens
caccatgtccccagtcagtctccttgctccccctgcagctgacaagccagagacgaccaaggagcaactgggagagttctacgaagctctcgactgcttgygcattcccaggtcagatgtcatgtacaccgactggaaaaaggtaaacgcaagggattggacagtgcccaccttgtccatggcccaacttgggcagcccca

SEQ ID NO: 15146 - DNA, 201 bp, Homo sapiens
ctgcagctgacaagccagagacgaccaaggagcaactgggagagttctacgaagctctcgactgcttgtgcattcccaggtcagatgtcatgtacaccgaytggaaaaaggtaaacgcaagggattggacagtgcccaccttgtccatggcccaacttgggcagccccagaggcccagagcaggaaagctgccaggcaagg

SEQ ID NO: 15147 - DNA, 201 bp, Homo sapiens
acggggttgggggattggcaattggaggggacgtaatgcggggagttaccacctacagacgcgtcccaaaccccaggctttcaccccacctccactccccrctcatttttaatacccgtgcagtggggaattgatactgtggttttcaatgtcacccacactgcagcacggccacagtcaccatcccgatttttgctacaa

SEQ ID NO: 15148 - DNA, 201 bp, Homo sapiens
acccgtgcagtggggaattgatactgtggttttcaatgtcacccacactgcagcacggccacagtcaccatcccgatttttgctacaaatgaaaattactktataatgagctccttaacacttttctttaaacctgtgtttggaagacttgtgttggtgtggccctgtgccctaatacctgtgaaatcacagcaccgatga

SEQ ID NO: 15149 - DNA, 201 bp, Homo sapiens
agcacggccacagtcaccatcccgatttttgctacaaatgaaaattactgtataatgagctccttaacacttttctttaaacctgtgtttggaagacttgygttggtgtggccctgtgccctaatacctgtgaaatcacagcaccgatgagctggttccaatttttaaaatatatacatgcagtacttccatgactattca

SEQ ID NO: 15150 - DNA, 201 bp, Homo sapiens
tgtgaaatcacagcaccgatgagctggttccaatttttaaaatatatacatgcagtacttccatgactattcaaagaaaaacaattccttccatttgccayctgagatgaccaccagggatgtgaactacctcctgccccatccccagccccaggatcctgggacagggcttatgaacgcaaccactgtagtcagctcact

SEQ ID NO: 15151 - DNA, 201 bp, Homo sapiens
aaacaattccttccatttgccacctgagatgaccaccagggatgtgaactacctcctgccccatccccagccccaggatcctgggacagggcttatgaacrcaaccactgtagtcagctcacttgatccacagcctggcacctccactgtctggctagggagcctcgaatgggtcccaaggccaccctgctcctcagttac

SEQ ID NO: 15152 - DNA, 201 bp, Homo sapiens
tcctcagttacatcatctgcatagtagtggtggttgtgaggaattcaggagctgcagcataagggccctgcaggtactatgtgctcagtaaatgccagtgrttcttaagggtctgagctcccatggtagaggcaagtaagctgaggttcagagacagaaaatgacttgcccaagatcacccagctgggaagtgacagtgcc

SEQ ID NO: 15153 - DNA, 201 bp, Homo sapiens
acatcatctgcatagtagtggtggttgtgaggaattcaggagctgcagcataagggccctgcaggtactatgtgctcagtaaatgccagtggttcttaagrgtctgagctcccatggtagaggcaagtaagctgaggttcagagacagaaaatgacttgcccaagatcacccagctgggaagtgacagtgccagggttgga

SEQ ID NO: 15154 - DNA, 201 bp, Homo sapiens
tagtggtggttgtgaggaattcaggagctgcagcataagggccctgcaggtactatgtgctcagtaaatgccagtggttcttaagggtctgagctcccatkgtagaggcaagtaagctgaggttcagagacagaaaatgacttgcccaagatcacccagctgggaagtgacagtgccagggttggagccctggttgagctg

SEQ ID NO: 15155 - DNA, 201 bp, Homo sapiens
aatgacttgcccaagatcacccagctgggaagtgacagtgccagggttggagccctggttgagctggttccacaggccagagctcattctgccctctcccyggaagacctcccaccctgtccccatgcctctgcttctccctcaccccaattccccgctgccttctaggataagtgtgagccactggagaagcagcacgag

SEQ ID NO: 15156 - DNA, 201 bp, Homo sapiens
tctggggtcccacaatgtcctggaactgaaggctcagaacctacaggaagtttgtccatttcagtgttactttcagtgagacaccattttcaaccatactsaggaggatccgctgaaaaatgaaacagaaatgagtcatgatgggcagagcagggagaagcaagggagacgagaagtggggaacatggaagaaaaagccac

SEQ ID NO: 15157 - DNA, 201 bp, Homo sapiens
gaggcaagagaatcacttgaacccgggaggcggaggttgcagtgagccgagattccaccactgtaccccagcctgggcaaccagagcaaaactcagtctcaaaaaaaaaaaaaaagaaaaagaaaaaagaaaaaaaaaagaaagaaaggagcactggagagtccaggtgcatactcttgtagacagcaacttgctgtgtgc

SEQ ID NO: 15158 - DNA, 201 bp, Homo sapiens
taggcttgatagcaaaaccccctcatggaagaatatctgggggttccatttgccaagcaaggggtgctggagaaaggcaataattaataattaataatagwaataataataataatagggattctgcaggagtgggagggtctggccccatgtcctgggaagtgggtagaagagcatccttcctagcccagtcctatagga

SEQ ID NO: 15159 - DNA, 201 bp, Homo sapiens
gcagatcacctgaggccaggaggtcaagaccagcctggccaacatggcgaaacccatctctaccaaaaataccaaaaaaattagccgggtgtggtggcacrctattgtattcccagctacttgagaggaggaggcatgagaatagcttgaatcttggagatgggggttgcagtgagccaagatggcgccactgcactccag

SEQ ID NO: 15160 - DNA, 201 bp, Homo sapiens
accccagctttggccactctgctttgttgtgtgttccttggggacggggcccagggccccataggggtaagtgatgaatgaatgaatgaatgaatgaatgmatgcaggcatgaacggagaggcctgtcaggactctaacactagcacaggaagagcatagtggtgaaaaggtgggactctggagtcacaaagacctgggtt

SEQ ID NO: 15161 - DNA, 201 bp, Homo sapiens
aggcgcacaccaccacgcccagctaatttttgtgtttttagtagagacagggtttcaccatgttggtcaggctggtttcgaactcctgaactcgtcatctkcccgcctcggcctcccaaagtgctggattacaggcatgagccactgcgcccggcctattctttattattaacatagaggtttatatattcttttgtgcat

SEQ ID NO: 15162 - DNA, 201 bp, Homo sapiens
cctgtaatcccagcactctgggaggctgagacgggaggattgcttgcgcccagaagtttgagtctagcctaggtaatatagaaagaccccatctttgcaaaaaaaaaaaaaaattatatatataaaaaaattagctggatgtggaagtatgcccctttggtcccagctacttgggaggctgaagcaggaggatcgcttggg

SEQ ID NO: 15163 - DNA, 201 bp, Homo sapiens
ttccacagaagttcaagagaggcattaaagacaccacagctctcagtaaactatcacaaggacaaaaaaccaaacaccgcatgttcttactcataggtggsaattgaacaatgaaaacaaatggacacaggaaggggaacatcacacaccgggggctgttgtggggtggggggagggatagcattaggagatatacctaat

SEQ ID NO: 15164 - DNA, 201 bp, Homo sapiens
taatccagtcctgtagactcccacacccagccacatctatgccttggtaagaggagctgggtccgtcctcaggatgtggggtttctgccaagcatggagasgtgggtgctgggaacagcttctaccaccagccccaggcatggtagccttgagaaaaattgaagtgaaacctgcaggaatttactgacaacaaagcaagtc

SEQ ID NO: 15165 - DNA, 201 bp, Homo sapiens
tgaggcaggagaattgcttgaacccgggaagcggaggttgcagtgagccaagactgcaccactgcactccagcctgggcaacagagtgagactctgtctcaaaaaaaaaaaaaaaagaagaaaagaaatgaagtacttgtatgtgctactccaacaaggattaactttgaaaacatcatggtaagtgacagatgtcagaca

SEQ ID NO: 15166 - DNA, 201 bp, Homo sapiens
cgtatgtattttcataaggtgctttaaaccacttctggaataaagccaatgtacagttataaacagacctgcaaacaattcacggttacttggactgtttsatgaagatacgaagacccttgagaagtaactaggaattgatttatttaataaaatgaactaagaaagtgaggcaacttatcctgaagaggaaaaggtaga

SEQ ID NO: 15167 - DNA, 201 bp, Homo sapiens
ctgaggcaagagaatcgcttgaacccaggaggcagaggctgtagtgagccgagatcgtgccactgcactccagcctggcaatgaagcaagactctgtctcaaaaaaaaaaaaaaaaaaaagaacgtgtgatgttttggggacaggacaccactgtagggggaggggtgtcagtctcaccttctcccgaagtctctcctgac

SEQ ID NO: 15168 - DNA, 201 bp, Homo sapiens
atcccagcactttgggaggctgaggtgggcggatcacctgaggtcaggagttcgacaccagcctgggcaacatgatgaaaccccacctctactaaaaatayaaaaattagccaggtgtggtggcaggtgcctgtaatcctccctgtaatacttgggaggctgaggcaggacaatcacttgaacctgggaggcggaggttgc

SEQ ID NO: 15169 - DNA, 201 bp, Homo sapiens
ccgcctcccgggttcatgccattctcctgcctcagcctcctgagtagctgcaattacaggcacctgccaccacgcccagctaattttttttttttttttgkatttttagtagagacagggtttcactgtgttagccaggatggtctcgatctcctgacctcgtgatccacccgcctcggcctcccaaagtgctgggattac

SEQ ID NO: 15170 - DNA, 201 bp, Homo sapiens
acagtcatgctattgaagaatatcaaataatgtaaaaattttgttatgttaagtggacaagccagttataaaataatatatatctagtttgagtccacttaaaaaaaaaacagtaaaatatggaggaagaggaggaggaagaaaggaaggagacaggataggaaaaagaaagagagagaaagcaaaagaaagagaaagaca

SEQ ID NO: 15171 - DNA, 201 bp, Homo sapiens
tattgaagaatatcaaataatgtaaaaattttgttatgttaagtggacaagccagttataaaataatatatatctagtttgagtccacttaaaaaaaaaasagtaaaatatggaggaagaggaggaggaagaaaggaaggagacaggataggaaaaagaaagagagagaaagcaaaagaaagagaaagacatgctttaaaa

SEQ ID NO: 15172 - DNA, 201 bp, Homo sapiens
ggcaggagaactgcctcaacctgggaggcagaggttgcagtgagccaagatcgtgccaccccactccagcctaggcgatgacagtgaaactgtctcaattaaaaaaaaaaaaagtttacaatcattatcactaggtagtagaattataggcaagtttttttgatagggaagtttaccatttttccttttgggtatttttca

SEQ ID NO: 15173 - DNA, 201 bp, Homo sapiens; identical to SEQ ID NO: 14724

SEQ ID NO: 15174 - DNA, 201 bp, Homo sapiens; identical to SEQ ID NO: 14725

SEQ ID NO: 15175 - DNA, 201 bp, Homo sapiens; identical to SEQ ID NO: 14726

SEQ ID NO: 15176 - DNA, 201 bp, Homo sapiens
gagagaacttccaagctcacacttgtgcaggtggaatgatgggggaagtgaagagacggtgcctagttcaaggtcacaaaggaagttcctgatgaggccawtgacccacactgacctccaaaccagaagatctagattttgctgggagtgtggggtgctgagctgggcctgccccgctgtttctaaccagaacccctcctc

SEQ ID NO: 15177 - DNA, 201 bp, Homo sapiens
agctggccattggggctggcctgggcttcacctgggccacttcatcttcaggagacagagctgctgccaggggccccagagtcaccgctggttcctgtcascatcggccatcctgcctgtgccctgtcagggacacattcaagagagaacattaatcaatcctgatcccctcttttattcggaacaagaagttaccagcag

SEQ ID NO: 15178 - DNA, 201 bp, Homo sapiens
ccaaccttgaggagctctctccagcctcctcaacctccagacttccgagggtcccatctggctcctcttcagtcatgtccagctgacggccctgctggggragccaggcaagaggctcatgggaacttgctgggctgtccacatcctctgcttcagcctctggaaagacaggccattcacttcttagcatataccagctct

SEQ ID NO: 15179 - DNA, 201 bp, Homo sapiens
cttccccaggccaggctcagcccagcggatctcagtctccgagctggccattggggctggcctgggcttcacctgggccacttcatcttcaggagacagakctgctgccaggggccccagagtcaccgctggttcctgtcagcatcggccatcctgcctgtgccctgtcagggacacattcaagagagaacattaatcaat

SEQ ID NO: 15180 - DNA, 201 bp, Homo sapiens
agaggaattcaagaaactaaaatatgaattgcttctgggaaggagaactgggtggctggaagacaggaatgagaagtagatttttctactacatgtccttygcatcctttgaaatctgaacaatgtgaattcgttgcctacccaaaaataaatattcaaatttaagacttcaaaaagtcaaggtacagtagcttatgcagc

SEQ ID NO: 15181 - DNA, 201 bp, Homo sapiens
attatctcagaggtccttcaaactcaaactcaaacccaaacccggtggatggtccctccagtgtctcccatctcagcagacggcaacaccatcccctctaygcatacaggccagaaggctgggaggcatctttgccatctctctccctctaaccccctgaatccattctgtcacttggtcctgtccaatgggacctcctat

SEQ ID NO: 15182 - DNA, 201 bp, Homo sapiens
catgcaggtgagtttgcttccaccactaggggtcacgtactaggggtgaaggggcctgggctttggagctagggagccctgggttcaattctggctcctawcacccctcactggggccacgggcaagctgctgacctctctggcaatccatagtcaaacttgaggatagttcctcctacctgacagagggtggtgaggagg

SEQ ID NO: 15183 - DNA, 201 bp, Homo sapiens
gtacaccctccctccaccagcagggagttcctggcccaaaccccaggcctccctaccgcagccagcctctaccccagggcttcctgcccaagccagcctcyaccccaggcctccccaccccaccagcctctatcccagggctctccacctcagccagcctccaccccaggcctccccaccccaccagcctctatcccaggg

SEQ ID NO: 15184 - DNA, 201 bp, Homo sapiens
ctgtgcagtgaacaaaacagaacttttctttgaagttttctcttcctaacacatggggtctgagtggctgttcaggaacaccagtgacaaattctcgagayggagacaaggatgcagcatagagagggccctagctacagttctgccataaaataccaaccttcactctctgtccaggcccagctcctctccctaccactg

SEQ ID NO: 15185 - DNA, 201 bp, Homo sapiens
gcttatatacgatatactatctctagaggaattcaagaaactaaaatatgaattgcttctgggaaggagaactgggtggctggaagacaggaatgagaagkagatttttctactacatgtcctttgcatcctttgaaatctgaacaatgtgaattcgttgcctacccaaaaataaatattcaaatttaagacttcaaaaag

SEQ ID NO: 15186 - DNA, 201 bp, Homo sapiens
gtctctcgggggcaaagctgggagtccactcaccttggccaggaactggctggcctgagaagccagtgcctgggtctgctctgctgaggactggtcctcaragatgtcccggttctccggaagccaccccagggtgggcatgctggtaagcgaggaggggctcaagtctcctcgagctgatggccaccctggaatacacaa

SEQ ID NO: 15187 - DNA, 201 bp, Homo sapiens
ggagggagggtgcagacgctccacgcctccagcccccgccactccatgaccttcagaggcccctatcccaacgggagccccagtttcccaatctgccaaayggggaagcccaagtgtttgggtctgatgaccagttcctttctccttggacctacttggagtctgcagccatgggaatgtggtttccccagagaggatgac

SEQ ID NO: 15188 - DNA, 201 bp, Homo sapiens; identical to SEQ ID NO: 14790

SEQ ID NO: 15189 - DNA, 201 bp, Homo sapiens
taatcccagcactttgggaggccgaggcgggcggatcacgaggtcaagagattgagaccatcctggccaacatggtgaaaccccgtctctactaaaaaaaraaaaaaaaaaaatacaaccgggcatggtggcgcatgcctgtaatcccagctactcgggacgctgaggcaagagaatcgcttgaacccaggaggcagaggc

SEQ ID NO: 15190 - DNA, 201 bp, Homo sapiens
tcaatctgccctcctacaaacatgagggtagaatttggctaagatcacccagctacttcctgccacagcaagatttgcaactgtcaattctggcctagtgrtaccccaatatttttttaatcacacaatccatcagtaaaaatatatttgctcgaacacatcacgctaatatattacatgtattggaaagagtattttcaa

SEQ ID NO: 15191 - DNA, 201 bp, Homo sapiens
ctgccaccttctagctgtgtgacctagggcaaggcacttcccctctctcaacctcacttttctcaactataaaatatggatgccaacaaaacccacccaayaccaaagaggaaatgttaaagcagcatttcccagacttaaggagtttgcataccaccttccctatttcagtcatttccataaacttccatctactccaaa

SEQ ID NO: 15192 - DNA, 201 bp, Homo sapiens
aaccatactcaggaggatccgctgaaaaatgaaacagaaatgagtcatgatgggcagagcagggagaagcaagggagacgagaagtggggaacatggaagraaaagccacgtgaggaagaaaccagaggtcaagagaaaaagaatcatggaggtagaggaagcaaaaaacacacataacaaagaatgtggactttgggtca

SEQ ID NO: 15193 - DNA, 201 bp, Homo sapiens
attctgttacccttccagaatcctgaaagagctcagagtttcccgggagccagcctagagacacttccaagcacaagtggagggatttggatgagatgcawtgccaaaaaggggggtgagacctagcactggtgacaaggaggaggctggagctgtgtggcctctaaaaccagggaggggctcatgttttggggatggctg

SEQ ID NO: 15194 - DNA, 201 bp, Homo sapiens
ttggtcaagttatttaacctctctgtgcctcagcttccccaactgcaaattatttaagagagtggtccataaacatcacctatgaccattcttattactawaacagtcatcaatccacctcatccctatgcctgtctccacacccagtgccagggcctgagtgccagggcttacccaggcatgaggaaagaaacacctgtt

SEQ ID NO: 15195 - DNA, 201 bp, Homo sapiens
gtgggctctgagcagagtgaaatggctcggtgggttctgaggactgcctctgaactcgtgggttctgagcagaagaccatcctggggtctctccagccttyggggtagagtgcacagaggtccagatggagtgaggcactggccagctggaatctcagctcccctcaagccccatggacccagagtgaatcccctccctgt

SEQ ID NO: 15196 - DNA, 201 bp, Homo sapiens
ggaatctcagctcccctcaagccccatggacccagagtgaatcccctccctgttccggggctctgtgttctcttctgcacataggagctgcaagcctgccrtgtactgttccttcagggcagctgtgagatggggttgggcaggagatgatagtatcatcctgcttccttccggtagagccctgaatggtgctcacacttc

SEQ ID NO: 15197 - DNA, 201 bp, Homo sapiens
caggccccagccatgcaggtgagtttgcttccaccactaggggtcacgtactaggggtgaaggggcctgggctttggagctagggagccctgggttcaatyctggctcctatcacccctcactggggccacgggcaagctgctgacctctctggcaatccatagtcaaacttgaggatagttcctcctacctgacagaggg

SEQ ID NO: 15198 - DNA, 201 bp, Homo sapiens
tgagaggctcacttcaggccaggagtttgagaccagcctgggcaacactgtgagaccctgtctctacaaaaaatacaaaaattagctgggtgtggtggcawgcacctgtagtcccagctcctcgggaggctgagttctgaggattgattgagccagaaaggtcgaggctgcagtgagccatgatcatgccactgcactcca

SEQ ID NO: 15199 - DNA, 201 bp, Homo sapiens
gatcaccaggcaactacaaatccaggtgagatgtgctggaggaggcacgggggctgccctgacacaggccagggaagtctggtgatcccagtttagaagcyggttcctccaagaatcctctctgacctcactggggtaagaattcagattgagaggtgggggaggatgatgaaaaaagcattccaggccaggtaggagagc

SEQ ID NO: 15200 - DNA, 201 bp, Homo sapiens
accttgtctctacgaaaaattagccaggtgtaattgtgcacacctgcagtcccagctactccagaggtcgaggtgggaggatcacttaagcccgggaggtygaagctgcagtgagccatgacagcgccactgcactccagcctgggcaacaaagtgagaccctgtctcaaaaggaaaaaaaaaaaaaaaaaggtagcattc

SEQ ID NO: 15201 - DNA, 201 bp, Homo sapiens
aggacagaaggtctgtgtttgtccctttatcctcatgaacacttggatcctgcttgatttgtgtggctgagaaaagtcagcaggcaactatttttggacasaaagttccccagggaacagtgcagcccgggaaaggctgacttctcaagggctggaggagggaggtgcagggaataccattcttccctccttggctgcgac

SEQ ID NO: 15202 - DNA, 201 bp, Homo sapiens
tcactgtaaaatagagaaagtaccacctgctcttgatatcgcaaggggatatcaccctgctagggtgggttgggaggcagggtatgggactcaaagagctytgaagtccctgattgactcagcttctaagggcaacagcctcagaactgttaacctctctcctcctccctgaggtcacatttcaaagtacaaagatacata

SEQ ID NO: 15203 - DNA, 201 bp, Homo sapiens
aagtccctgattgactcagcttctaagggcaacagcctcagaactgttaacctctctcctcctccctgaggtcacatttcaaagtacaaagatacatactkagcacccagtgggcgcaaattaactttttaaaaaagccctatgacttcctactatataccaggcgctacgtaagatgcaaagaatatagaaaagagtaaa

SEQ ID NO: 15204 - DNA, 201 bp, Homo sapiens
cagccaggaagcgcagacagaggattcaaagctggggtaccgcaactctgaaaccaaggctgtcagatgtgtcagggagatggggaaggaagaccaccccycaaatcagtaaccagaccttccaaaaaggctcaaccatacccccacccacctgctggcagggcacagacttgctgttctcaaggggttcccaccagctgt

SEQ ID NO: 15205 - DNA, 201 bp, Homo sapiens
ttgccctggaggccgggatcccctaagccaagagaaaagcggtgcagctccagcagctgcaacttcctggctgggctggtccggctgcctggactgtcccrgagagtctgtgactggcccgtccagaaggaaagcggcctcccgggccctcctccgttccaatcccttacctctctcgggctccaccaccgtcctgccgac

SEQ ID NO: 15206 - DNA, 201 bp, Homo sapiens
tgttccaaacccagggagccccctgtctccattgcgccctggcccacctccaggccgttctgccagcccaagctgctgctcacagaccagcatcgctcccyacctctccccgcccctgccgtggttgaggccgcctcgcctcggcaggaagcgcccagcctgatttcctacaagtgtttgtcagaaggagggggtttgtct

SEQ ID NO: 15207 - DNA, 201 bp, Homo sapiens
aatatctttcctgaagcctggcacactgtttatggctgatgaatgtgttctgtgaatgaatgaatgaatgaatgagtggacgttcccaaggtcagcttgtraatatctggcgtagccagggctagaaccaggagccctcatcctggtaatcgcccacccctctatcccctttcctgccttttacccacatctgggtggcag

SEQ ID NO: 15208 - DNA, 201 bp, Homo sapiens
agggctctccctgtagcccccagccccacatggagcagagccaaaccctaatgaggcccctccctatcagctctggaggccatgtgtgccattgtgcaagrggcgggctcccctgacaccctgtcactcactcaccctccctccctggtcattaacccaggcagcattaacccaggtggctgccattgctgggcatagcct

SEQ ID NO: 15209 - DNA, 201 bp, Homo sapiens
tatgtgattatttgattaacatctgtctcttcactcagttgggagctctgtgaggctctcatcatcatatccccaggacccagcacacaggccctgatatmcaatagaaatacaataaatatatcctggatgatccactcaacctagctacttgcccaagcctgactcatagccctcataacaacccaatgaggctgatgt

SEQ ID NO: 15210 - DNA, 201 bp, Homo sapiens
aaggtgatgagctgcagtagagtttcaaacacacaaagacctggcttctaataaccaagcttggtgctcacaacattgcagcccgcagagataattaatayctgtgcacaataaaatcgagagtggagcttcttaccaactaattgcaattcacaaagccaatgttccaattttatagtgaggccctggttccacacagag

SEQ ID NO: 15211 - DNA, 201 bp, Homo sapiens
ctcccaaaccagtttgggcagatggcccattggaaccccactctcctcatcagtaaaaggggggcagagtgagggtcctgagggttagcacatggactgtktgaagcagacaatgcccagtgcttagcaccggaatcagggtctagcaggtgctccctaaatggcaggtgctgtttgctattgaaagtactggaaggctgg

SEQ ID NO: 15212 - DNA, 201 bp, Homo sapiens
gtgctccctaaatggcaggtgctgtttgctattgaaagtactggaaggctgggcgccatggctcacgcctgtaatcccagcaatttgggaggctgaggtgrgtggatcacctgaggctgggagtgcaagatcagcccgaccaacatggagaaaccctgtctctactaaaaatacaaaattagccagacgtggtggtgcatg

SEQ ID NO: 15213 - DNA, 201 bp, Homo sapiens
gcaagagaatcacttgaacccgggaggcggaggttgcagtgagccgagattccaccactgtaccccagcctgggcaaccagagcaaaactcagtctcaaaraaaaaaaaaaagaaaaagaaaaaagaaaaaaaaaagaaagaaaggagcactggagagtccaggtgcatactcttgtagacagcaacttgctgtgtgcctc

SEQ ID NO: 15214 - DNA, 201 bp, Homo sapiens
ggggttacagtgggacaagaaaacatggactcctgcaatcttcttggagccggatcttgggaaggccaggatcaccctaggcttgatagcaaaaccccctyatggaagaatatctgggggttccatttgccaagcaaggggtgctggagaaaggcaataattaataattaataatagtaataataataataatagggattc

SEQ ID NO: 15215 - DNA, 201 bp, Homo sapiens
tggctccggtaagtgctccataaacgtgagctcctaagacccagagtcagacagctggaaggggcagccatgggttcacacctgggcccgactctccccayatatctaatgtgtgctaattggcaagcagcagatgctgataaaataatctgaactgtatgaacaggcttcttgcatccccaaaacagcagcctgcactcc

SEQ ID NO: 15216 - DNA, 201 bp, Homo sapiens
ctcaggagaagtaaagactccatggctaccgtggggtcaccaaattctgggcaaaacctttcccgatcaatgagttggaacactggcaggcgctttccccygtgtctgctggaggtctgagcatgcagcattggttctcatctctgctggagtggaagattccttaacgacttgcttagactcagctgagagggcagcaag

SEQ ID NO: 15217 - DNA, 201 bp, Homo sapiens
aaatgcagcccaaccccccgccccaaccacagtgagacagagccattctccatgtgggagtggcccagaacagtcccctggggaaccaggggggtcagtasaggcaaaagggaacaggaggagagtgggtgccattgttctcttcccacatacatccccaatgccacacctgggtgagttccagggctggtctgtttctct

SEQ ID NO: 15218 - DNA, 201 bp, Homo sapiens
tgcccttgggcaagttacttaatctctctgagccttggtgtccttgtctataaaatggacgtaatagtactgcagtacttagttcatagaactgtgaggaytaatttatgcaaaacccttaacatgacaccctctacagagagggacttaataaatggcagctcattatcatcagtcattatcatcactattgcttgaaaa

SEQ ID NO: 15219 - DNA, 201 bp, Homo sapiens
caccatgtttttgtggggctggcttcagagcctcctctgaaattatagtcacctctttccacgtatgcatgtttctggggagagcattaataacttttaaygaatctcccaaagggatgggtgaccaaaggttaaaaaccactaatccgtcccctgcattaaaagcaatgaactggccagacatggtggctcacgcctgta

SEQ ID NO: 15220 - DNA, 201 bp, Homo sapiens
taatccgtcccctgcattaaaagcaatgaactggccagacatggtggctcacgcctgtaatcccagcactctgggaggctgagacgggaggattgcttgcrcccagaagtttgagtctagcctaggtaatatagaaagaccccatctttgcaaaaaaaaaaaaaaattatatatataaaaaaattagctggatgtggaagt

SEQ ID NO: 15221 - DNA, 201 bp, Homo sapiens
aaaaaaaaaaaattatatatataaaaaaattagctggatgtggaagtatgcccctttggtcccagctacttgggaggctgaagcaggaggatcgcttgggycagggaggacaaggctgcagtgagccataatggcgacactgcactgcagcctgggtgacagagcaagaccctgtctcaaaaacaataaagaaataaataa

SEQ ID NO: 15222 - DNA, 201 bp, Homo sapiens
gacactgcactgcagcctgggtgacagagcaagaccctgtctcaaaaacaataaagaaataaataaaaaataaaagcaatgaaacccttggaatactactyagcaatatataaaggagctaactattaatacacagaataatctagataaatctccagagaattatgctgagtgaaaagccaatcccaaaaggttacatag

SEQ ID NO: 15223 - DNA, 201 bp, Homo sapiens
agaacattcttgaaatgataaaattatagaaatggagaacagattagtgcttaccaggggttaaggacaggctgggggcaggagggaagtgggtgtgcctrtgaaagggtagcatgaggctccttgtggtgatggaacgttctgtatcttgactgcatcaatgtcaacatctggctgtgacattgtactacagttttgcaa

SEQ ID NO: 15224 - DNA, 201 bp, Homo sapiens
atgtcaacatctggctgtgacattgtactacagttttgcaagatagtctcactggggaaaactgagtaaaggcacatgggatctctgtgtattatttcttrtaactgcatgtgaatctacaattatctccaaataaaaagtttaattaaaggccgggcgtggcggctcacacctataatcccagcactttgggaggctgag

SEQ ID NO: 15225 - DNA, 201 bp, Homo sapiens
tctgttcaccttgtaaaaactcatcaatttaagttctttttggtggtttttaatttcaataaataattcatgtgtatttctaaaggtcaaaaactgaatcrcatatagatttcatagacatggaaagtgtttatagtacaatttagtgaaaaaaggaggtcgccaaatattcacatataaaatgatcttattttttgtttt

SEQ ID NO: 15226 - DNA, 201 bp, Homo sapiens
aactcatcaatttaagttctttttggtggtttttaatttcaataaataattcatgtgtatttctaaaggtcaaaaactgaatcacatatagatttcatagmcatggaaagtgtttatagtacaatttagtgaaaaaaggaggtcgccaaatattcacatataaaatgatcttattttttgttttttttttttatgtttttt

SEQ ID NO: 15227 - DNA, 201 bp, Homo sapiens
aatttaagttctttttggtggtttttaatttcaataaataattcatgtgtatttctaaaggtcaaaaactgaatcacatatagatttcatagacatggaawgtgtttatagtacaatttagtgaaaaaaggaggtcgccaaatattcacatataaaatgatcttattttttgttttttttttttatgttttttgagatgga

SEQ ID NO: 15228 - DNA, 201 bp, Homo sapiens
gaatgtgaaggcctaggacattactgtacactgctgtagactttataaacaccatacacttaggctaaatttacaacatttatacaaaagttttttcttcrataattaatcaagtttaacttacagtaacatttttactttataagctttttaaatggtttttaaccttttgactcttttgtaataacatttaacttaaaa

SEQ ID NO: 15229 - DNA, 201 bp, Homo sapiens
ctcttttgtaataacatttaacttaaaaatacattgtaaagtaaaaaatattttctttcttgatatccttataagcttttttctatttttaactttttttwaaaaaactttaaaaacttttctgttagaaactaagacaaacacacacacatcacagacacacacacacattagcctaggcctgtatagggtcagggtcat

SEQ ID NO: 15230 - DNA, 201 bp, Homo sapiens
ctgttagaaactaagacaaacacacacacatcacagacacacacacacattagcctaggcctgtatagggtcagggtcatcaatatccctgtcttctacckccacatcttgttcttctggggcaataatagcactgtcatctgtgataacaacaccttcttctggaatacctctcgaaggactacctgaggctatttaata

SEQ ID NO: 15231 - DNA, 201 bp, Homo sapiens
ctgggctaatgttcctgctgtgctgggggaccgtggaggaagggacacacaggggtcacacagagtgagacactcaggcggcagcatctgagcccctccayatgctaacccaataagctcccaccctttgtaactttgcatctcgggtggtacaatatttccaaggacacacacacattagatgcccaattctttgtaaac

SEQ ID NO: 15232 - DNA, 201 bp, Homo sapiens
caacctccgcctcctgggctcaagagattcacctgcttcagcctcccaaatagctagggctataggcgtgtaccaccatgcctggctaatttttgtatttyttgttgagatggggctttgccgttttgctcaggctagtcttgaactcctggactcaagtgatccacctgccttggcctccctcaatgctgggattacagg

SEQ ID NO: 15233 - DNA, 201 bp, Homo sapiens
ttcagttccatcctggttaaatgagggtgataaatgtaactgcttcactgggttttgatgatgaccaaataaaataacatactctagggtttaccacagtycctgtacacaaccatccttgcttaataatgggtaactattgtgaaataatgatcgttatcatgggaagctactcaggaactgtttgctctaaaagagacc

SEQ ID NO: 15234 - DNA, 201 bp, Homo sapiens
cctgctcaaaaaagtttaattacaaaaaaaggcaagggatgatgtaaggttcggttttaagaaagctctagatcagtgtgaaatatagaaatgtatattayataatcatattacataattttataatatataaaatagaactataatgtgagctacaccatctataattttctcatagccacattgagaatgtaaaaagaa

SEQ ID NO: 15235 - DNA, 201 bp, Homo sapiens
aggagctcaagaccagcctggccaacatggtgaaaccccatctctactaaaaatacaaaaattagccaggcatggtggcgcgtgcctgtaatctcagcttytagggaggcttgaggcaggagaattgcttgaacccgggaagcggaggttgcagtgagccaagactgcaccactgcactccagcctgggcaacagagtgag

SEQ ID NO: 15236 - DNA, 201 bp, Homo sapiens
cttccaaccctggatctggctcagtggttcagaaagctggaaggagcctgcttggctcccaggaggaagtctgattagcccctcttttacagatgtgcccsatgaggccaagagggaagggtcctgcctgtgccaggcagcaggtgtggggacgcagcggggggggggggggtcctggtcctagaacaggcccccttccat

SEQ ID NO: 15237 - DNA, 201 bp, Homo sapiens
ggatctggctcagtggttcagaaagctggaaggagcctgcttggctcccaggaggaagtctgattagcccctcttttacagatgtgcccgatgaggccaaragggaagggtcctgcctgtgccaggcagcaggtgtggggacgcagcggggggggggggggtcctggtcctagaacaggcccccttccatttcctcaccac

SEQ ID NO: 15238 - DNA, 201 bp, Homo sapiens
cttggctcccaggaggaagtctgattagcccctcttttacagatgtgcccgatgaggccaagagggaagggtcctgcctgtgccaggcagcaggtgtgggsacgcagcggggggggggggggtcctggtcctagaacaggcccccttccatttcctcaccacagtggcctccgcccacctgccccggaagtgcctctcgac

SEQ ID NO: 15239 - DNA, 201 bp, Homo sapiens
ttagcatatttccagcaattaatgcaggaatgagagcattagcatactaccactttgtcacctcaaatgaaagactagcccaagacaatgaccatcagagkctgtcaaaatcaccaacaagagagcagcaggcatcctgtgcttactgaaggaggcactcacgtgctcttgccaaaactccccacgcccgtggagctcatg

SEQ ID NO: 15240 - DNA, 201 bp, Homo sapiens
tagaccccgtgttgacctcagggataagtccaaagtttcatgagacatagtttgggtaccaccaggcatagactctctgttcaggcagatgcacctttgtygcactctctgttcctccatgctctttcccctacccttgatgcctctacgtctcttaaccacttaacatgtccttcagcaagttactcttgcttacagcag

SEQ ID NO: 15241 - DNA, 201 bp, Homo sapiens
gggcaacactgtgagaccctgtctctacaaaaaatacaaaaattagctgggtgtggtggcatgcacctgtagtcccagctcctcgggaggctgagttctgrggattgattgagccagaaaggtcgaggctgcagtgagccatgatcatgccactgcactccagcctgggcaacagagcaagactctgcctcactaaaaaaa

SEQ ID NO: 15242 - DNA, 201 bp, Homo sapiens
gaggccgaggcgggcggatcacgaggtcaagagattgagaccatcctggccaacatggtgaaaccccgtctctactaaaaaaaaaaaaaaaaaaaatacamccgggcatggtggcgcatgcctgtaatcccagctactcgggacgctgaggcaagagaatcgcttgaacccaggaggcagaggctgtagtgagccgagatc

SEQ ID NO: 15243 - DNA, 201 bp, Homo sapiens
acaagaagttaccagcaggaactctggaattagccccagttcaactcctggttgtgtcctcccgaagctgtgtcaccttgggcaagtcactctgccttcaytttcttcatcaataaagctgggataataattcctctctctctccagggtttttttttttttttttttttttgagacacagtctcactctgttgcccaggc

SEQ ID NO: 15244 - DNA, 201 bp, Homo sapiens
ccaccacacccggctaatttttgtattttttagtttcactgtattggcgaggctggtctcgaactcctgaccttgtgatccacccgccttggcctcccaargtgctgggattacaggtgtgagccaccatgcccggccccctccagggttttataaactagatgagacacaggatgaggagcccagtggccagtgcaccaa

SEQ ID NO: 15245 - DNA, 201 bp, Homo sapiens
tttttgtattttttagtttcactgtattggcgaggctggtctcgaactcctgaccttgtgatccacccgccttggcctcccaaagtgctgggattacaggygtgagccaccatgcccggccccctccagggttttataaactagatgagacacaggatgaggagcccagtggccagtgcaccaacgaacaggtgttgaatg

SEQ ID NO: 15246 - DNA, 201 bp, Homo sapiens
tggccagtgcaccaacgaacaggtgttgaatgcatgctagctagtgttactgcgtactggctcttcgtgtgggcatggggcacaggccctgctcatgggaraactgatggcccaggaggaagcagacgatcaccaggcaactacaaatccaggtgagatgtgctggaggaggcacgggggctgccctgacacaggccaggg

SEQ ID NO: 15247 - DNA, 201 bp, Homo sapiens
atggtaaaaccttgtctctacgaaaaattagccaggtgtaattgtgcacacctgcagtcccagctactccagaggtcgaggtgggaggatcacttaagccygggaggtcgaagctgcagtgagccatgacagcgccactgcactccagcctgggcaacaaagtgagaccctgtctcaaaaggaaaaaaaaaaaaaaaaagg

SEQ ID NO: 15248 - DNA, 201 bp, Homo sapiens
tgcacacctgcagtcccagctactccagaggtcgaggtgggaggatcacttaagcccgggaggtcgaagctgcagtgagccatgacagcgccactgcactscagcctgggcaacaaagtgagaccctgtctcaaaaggaaaaaaaaaaaaaaaaaggtagcattcctgtacccaacataattgaaaaacaggtgctcaaat

SEQ ID NO: 15249 - DNA, 201 bp, Homo sapiens
gggtagccagagaagggctcctccgctgccttccctcaaccctctccttctttccctctttccttctccctctcatctccttttgcctcttccttctgacrctcctgctatttccctaagcgcttcctctatgccagcactgagccaggcccaggaagtgcaaagctgacccagagtgggcacggtcccccagggagctcc

SEQ ID NO: 15250 - DNA, 201 bp, Homo sapiens
tctccttttgcctcttccttctgacgctcctgctatttccctaagcgcttcctctatgccagcactgagccaggcccaggaagtgcaaagctgacccagastgggcacggtcccccagggagctccctgccatggagggttcagagaactgcagcccatcagtgcagcggcccccagagcagctcacacaaaggccttctt

SEQ ID NO: 15251 - DNA, 201 bp, Homo sapiens
agagcagctcacacaaaggccttcttccacagatggggaaactgggatccagagaggggagaggccttgcctaaagccacacaggggtcaggacaaggcakgggtgaaagtcagcctcctggcccacagtctgggctttctcccctgcatgctgtgttgaaggcagtatgactccaggcctcccaggacagaaggtctgtg

SEQ ID NO: 15252 - DNA, 201 bp, Homo sapiens
ggagaggccttgcctaaagccacacaggggtcaggacaaggcaggggtgaaagtcagcctcctggcccacagtctgggctttctcccctgcatgctgtgtygaaggcagtatgactccaggcctcccaggacagaaggtctgtgtttgtccctttatcctcatgaacacttggatcctgcttgatttgtgtggctgagaaa

SEQ ID NO: 15253 - DNA, 201 bp, Homo sapiens
tgaagcctctgctgaggaaggggccgggggaggtgtgcggttttttgactttttaaagggctttttttctagctctgccacagagcagcctgcccaatcayagagccctctgggtgcacaaagaggaacatcctgtcttctgggatgactcagtcgtggcagaaatctcactgtaaccaggggaaggtgcacgtcagaggc

SEQ ID NO: 15254 - DNA, 201 bp, Homo sapiens
tccctgttaacttctaggcaacctccagatgtcagctccagcgtgccctccttggggactccccatttggaactatatttcatatgtgattatttgattamcatctgtctcttcactcagttgggagctctgtgaggctctcatcatcatatccccaggacccagcacacaggccctgatatacaatagaaatacaataaa

SEQ ID NO: 15255 - DNA, 201 bp, Homo sapiens
ctcacgcctgtaatcccagcactttgggaggctgaggtgggcggatcacctgaggtcaggagttcgacaccagcctgggcaacatgatgaaaccccacctytactaaaaatacaaaaattagccaggtgtggtggcaggtgcctgtaatcctccctgtaatacttgggaggctgaggcaggacaatcacttgaacctggga

SEQ ID NO: 15256 - DNA, 201 bp, Homo sapiens
tagaaactctgtcctcactctgagtagttaaggagcagaacaaacagccccttctcagccaactgagataagggttatgaggagggtgtggccatattgakgaaaacacatacataaattcaaattcatgctcttttcaaagagtcaaacaaaccgtgcacgtgccaggaagggactgctaacagcaaaactatactgaac

SEQ ID NO: 15257 - DNA, 201 bp, Homo sapiens
ctgcctcagcctcctgagtagctgcaattacaggcacctgccaccacgcccagctaattttttttttttttttgtatttttagtagagacagggtttcacygtgttagccaggatggtctcgatctcctgacctcgtgatccacccgcctcggcctcccaaagtgctgggattacaggcgtgagccaccgtgcccggccct

SEQ ID NO: 15258 - DNA, 201 bp, Homo sapiens
atggtctcgatctcctgacctcgtgatccacccgcctcggcctcccaaagtgctgggattacaggcgtgagccaccgtgcccggccctggacagtgtgatyttaatcactttgcaactgaaacttgcaataggtaaaatggttggaaacaatagcagtgtcccgtaacaggtgatcattgaaagaaattgtgatagttcca

SEQ ID NO: 15259 - DNA, 201 bp, Homo sapiens
gagttcgagaccagcctggtcaacatggcgaaaccccgtctctactaaaaatacaaaaattagctgggtgtggtgacgtgcacctgtaatcccagctactygggagactgaggcaggagaactgcctcaacctgggaggcagaggttgcagtgagccaagatcgtgccaccccactccagcctaggcgatgacagtgaaac

SEQ ID NO: 15260 - DNA, 201 bp, Homo sapiens
ccccaatcccttggcacaatgacaaatcttagggcaccatcctgtcaggtttttcccctgcttaacgaccatccgtggctcctgtcactttcaggttaaasgccagacattttggcctggaattcaggctcataccaacctgttcccaagtcaggggctgctgcactgcataactcacaccgtacactacaaaagccatct

SEQ ID NO: 15261 - DNA, 201 bp, Homo sapiens
ggtcttccatcccccaacacccttcacctgcagctgtctttaaaaaaaaaaaaaaaaaaaaaaagtaagaaaaagccctgatttgtggtggttactaattytgatggtgttaaatacccttactgaaattggccatgccaatttcaagctattgatatcactgaatgctgcactgggaagagatgggcacaatccactctc

SEQ ID NO: 15262 - DNA, 201 bp, Homo sapiens
gctgtctttaaaaaaaaaaaaaaaaaaaaaaagtaagaaaaagccctgatttgtggtggttactaattttgatggtgttaaatacccttactgaaattggycatgccaatttcaagctattgatatcactgaatgctgcactgggaagagatgggcacaatccactctcccgagctgacaccagcacaccctgcacacccc

SEQ ID NO: 15263 - DNA, 201 bp, Homo sapiens; identical to SEQ ID NO: 14848

SEQ ID NO: 15264 - DNA, 201 bp, Homo sapiens; identical to SEQ ID NO: 14849

SEQ ID NO: 15265 - DNA, 201 bp, Homo sapiens; identical to SEQ ID NO: 14850

SEQ ID NO: 15266 - DNA, 201 bp, Homo sapiens; identical to SEQ ID NO: 14851

SEQ ID NO: 15267 - DNA, 201 bp, Homo sapiens; identical to SEQ ID NO: 14852

SEQ ID NO: 15268 - DNA, 201 bp, Homo sapiens; identical to SEQ ID NO: 14853

SEQ ID NO: 15269 - DNA, 201 bp, Homo sapiens; identical to SEQ ID NO: 14854

SEQ ID NO: 15270 - DNA, 201 bp, Homo sapiens; identical to SEQ ID NO: 14855

SEQ ID NO: 15271 - DNA, 201 bp, Homo sapiens; identical to SEQ ID NO: 14856

SEQ ID NO: 15272 - DNA, 201 bp, Homo sapiens; identical to SEQ ID NO: 14857

SEQ ID NO: 15273 - DNA, 201 bp, Homo sapiens
gccaccaccctgacattcatcaccattatcttcaccaccaccgtcatcaccactaccatcattagcatcaccatcagcatcatcaccatcagcatcatcamcaccactgtcattaccaccaccatcatcaccgtcagcaccataacaatcactattaccatcaccatcattcaccatcattaccatcaccatcactatcac

SEQ ID NO: 15274 - DNA, 201 bp, Homo sapiens
ttgaatccccaggatccaagtgtctaacttactctcgccctgccctggtgagcaggaagctggggatggtctctgttggtccacagggtagaggcgcagcrgcaggggcgggggctgggggtgggctgattgtcttgttgggaaggggctgttcagaaatccgtttgtgcccctcaaactctgagccaggaaccgctaggg

SEQ ID NO: 15275 - DNA, 201 bp, Homo sapiens
catcacgctcccgtctgtatgatgagcttgaatccccaggatccaagtgtctaacttactctcgccctgccctggtgagcaggaagctggggatggtctcygttggtccacagggtagaggcgcagcggcaggggcgggggctgggggtgggctgattgtcttgttgggaaggggctgttcagaaatccgtttgtgcccct

SEQ ID NO: 15276 - DNA, 201 bp, Homo sapiens
tatgctgctgccacggggtaggggtgcgggaggcggcctggcctcatggccgcagaccgtgccccagcccgggcctggcaggtagctggccactgataaaygccactgggatcctaggagaagctggggaccatgcgtgaggtactgaaggggaccatggtggatggcatcctgggcactttgtagcttgtctgagggaaa

SEQ ID NO: 15277 - DNA, 201 bp, Homo sapiens
gagagactgcctgaggttctgcctggaccgaaggaggcctcgctcacagcacctctgtgaggggactggtgctcctgggaagtcacttctcttggtgaccragctgacaccccctccacttggaaagcacagggactgagcaggcgggacctgtgctggagggagaccctcctggtgaggaactatgcgggccttctgggc

SEQ ID NO: 15278 - DNA, 201 bp, Homo sapiens
ctgcccatctagtacatgccagccagcgtgccaggctctggggttacagtgggacaagaaaacatggactcctgcaatcttcttggagccggatcttgggraggccaggatcaccctaggcttgatagcaaaaccccctcatggaagaatatctgggggttccatttgccaagcaaggggtgctggagaaaggcaataatt

SEQ ID NO: 15279 - DNA, 201 bp, Homo sapiens
aaacagtctgacagttcctccaacagttaaacccagtgcctagcccagggctggcatcctcatctttggtacccatgtaccagttggtgcctttatctttwttttacagatgagcaaagcggagctcagagaagctaagtgattcaggaggcagtagaatgcaccagccttagcagctcaggccctggagccctgccccaa

SEQ ID NO: 15280 - DNA, 201 bp, Homo sapiens
aaggaggcatggcaatcgcataccacatgggatcgtggatgggatcctggaacagagacaggactttggaggaaaacggcctgaaggaactacgaacttcrgttaccaataatgtatggatattgcttcactaacgtggccaatgtgccacattattgtaagatattaataataggggaaactgtttgtgcaggagtgagg

SEQ ID NO: 15281 - DNA, 201 bp, Homo sapiens
attaaaaaaaacccagtgctcatcacttacttgcggagaaaacccataaggaaaatggaagatggttaggattctcagtctccacaaagttataagctccmagagggcagggccctcttgctagtccccttcactgctgggtcccagggccgagcactctccttggtacatgggtttgttgagtgcctatatgagtgttgg

SEQ ID NO: 15282 - DNA, 201 bp, Homo sapiens
cctgtggatggatgcaaaatagaggaagattctggaataatgatctcctcttcctccaaatggttttaatagtttctgtctctctctcacgtgtgcacacrgtgagtgtgcatacacacatcatgtgtaaaatatgtacatatttaagtatgacacacatacacacatatacgtcaccgaacatctttgtgtctgtttatt

SEQ ID NO: 15283 - DNA, 201 bp, Homo sapiens
gccaggaagaaatgataagcaaagcaacaataagaaatgaacaagtgatgctattccccacaccccgacttgctggtttggttctgaatggctcgggcacrgggtcagtggtgttttctccccatgctctgagcggctgtaacatggggataaacatagcgcccatttcacaggcttgttgggagaactgaacggggccgt

SEQ ID NO: 15284 - DNA, 201 bp, Homo sapiens
gagccattttctgtgagactgacttcagagtctttggttttgacttctatactctcttcctctcattgtgttggaagcatttctccaggttaagctcactwttaagggttaagatcacctttaaaggctacagaaaacctcatccaatgatatcatctctttccttttgctagtaagtccacagagagattgtccggtgag

SEQ ID NO: 15285 - DNA, 201 bp, Homo sapiens
gagtgcaatggcatgatcttggctcactgcaacctctgcctcctgggttcaagagattcttgtgcctcagcctcccaaatagctgggattacaggcacccrccaccacacccagctaattttttttgcatgtttagtagaaacggggttttgtcacattggccaggctggtcttgaactactgatctcaggtgattctccc

SEQ ID NO: 15286 - DNA, 201 bp, Homo sapiens
gctctggggtggatgcctgggttttaatccccagtctcccccttaggagtaacagctggcatttccagaaccctgcccccgtgccaagcgctagtctagaygctctgtgtgtgccgtgttgggcaccttcacagcaatcccacgatgtggacactgttataactacatggtgagctgtccctttaactgctcagagcaggt

SEQ ID NO: 15287 - DNA, 201 bp, Homo sapiens
tggggtggatgcctgggttttaatccccagtctcccccttaggagtaacagctggcatttccagaaccctgcccccgtgccaagcgctagtctagacgctstgtgtgtgccgtgttgggcaccttcacagcaatcccacgatgtggacactgttataactacatggtgagctgtccctttaactgctcagagcaggtaaac

SEQ ID NO: 15288 - DNA, 201 bp, Homo sapiens
gagcaggtaaacaactcggccaaggacaagtggaggggagctcgctgatcccggctactgactccagagccctgatcctttagcacatcccctgcgctcaytgggcttcagcgcccttatctgtgaaatgtggataatatgaccatcttgcagtggaggttaagcaagacagcagctacaaagcccttacagacaccctac

SEQ ID NO: 15289 - DNA, 201 bp, Homo sapiens
tgctgtggtccctgaccactgagccaacatgctcagactgtggcctctggaaatcagcctttgcaggtggtcacttactcagggacagtcggagcacctcycgaggcactgaggaagacctggctcgctgccttcctggagggacaatctgctcttcacctctaggctcaccaggcaatctctctgtggatttactagcaa

SEQ ID NO: 15290 - DNA, 201 bp, Homo sapiens
agagagtatagaagtcaaagccagactctgaagtcagtttcacagaaaatggctctgcgcctctctgatcctcagtttcctcatctgtcaagtggggatamtaacagcaattacctcagagggttataaaaagattaatgagaaaatgttcataaaacccttcatcaagtgccctcccatagactcaaaagaagccagctg

SEQ ID NO: 15291 - DNA, 201 bp, Homo sapiens
taaaaagattaatgagaaaatgttcataaaacccttcatcaagtgccctcccatagactcaaaagaagccagctgattttatgtcattgtcataaatgaayaaacaccgaattaatgggtgagagtgaaggcatgctggcaatgttctaactctttggttgggtggtgggtctagggatattcattgtattattctttatt

SEQ ID NO: 15292 - DNA, 201 bp, Homo sapiens
ttcatcaagtgccctcccatagactcaaaagaagccagctgattttatgtcattgtcataaatgaacaaacaccgaattaatgggtgagagtgaaggcatsctggcaatgttctaactctttggttgggtggtgggtctagggatattcattgtattattctttattattattattattattttgagacagagcctctctc

SEQ ID NO: 15293 - DNA, 201 bp, Homo sapiens
atgggagccccaggtggctggggagtctgctggccggccgcgggtccgggcggggcggtcaaaggcagatgctgggcgtgtcgggctgccctggagtggcyggtgcaggctgtcttccagccgcagacgaagccgggacacctcttcttgcagctcacagatggcctggctggggttggagtggagacagaaacaaagaac

SEQ ID NO: 15294 - DNA, 201 bp, Homo sapiens
tacgctacgtccctgcttaaaatccccttccctgtcctctcagcctttgtgcactcatggaatacgcagtgaatgtctccccttacccatggccttcaggycctgtaggatctcccataggtctctcctctctacccctctcttcctttactgctcaacactccaccccctcacactagaggatctggctgaccgtttagc

SEQ ID NO: 15295 - DNA, 201 bp, Homo sapiens
tgacagcctcatgcctgttcgagccaaagaaaccttggctgggccaccaccgagcagtctccccagcgcatcccgggacagacacccactccagcaagggygtgtaagtgatcactggccaaaagcaactaagaggaggtgtgagagaactgaccaagcgattttaccatttctgttcaaccaaggaagtggaactttctt

SEQ ID NO: 15296 - DNA, 201 bp, Homo sapiens
aaaaaaaaaaaaaaattatatatataaaaaaattagctggatgtggaagtatgcccctttggtcccagctacttgggaggctgaagcaggaggatcgcttrggccagggaggacaaggctgcagtgagccataatggcgacactgcactgcagcctgggtgacagagcaagaccctgtctcaaaaacaataaagaaataaa

SEQ ID NO: 15297 - DNA, 201 bp, Homo sapiens
aacccttggaatactactcagcaatatataaaggagctaactattaatacacagaataatctagataaatctccagagaattatgctgagtgaaaagccartcccaaaaggttacatagtatatgattctatttatagaacattcttgaaatgataaaattatagaaatggagaacagattagtgcttaccaggggttaag

SEQ ID NO: 15298 - DNA, 201 bp, Homo sapiens
tagctatgtgaggctggactagttactcccctctctgaagctctgtttcctctgtccataacacaggaacaagaaatcacggttaggggatgaaatgaggscctacgaatggacagaccatcctctcttattctgggccatcacaggcactgtgattcccaggctgtcccaggaatgtggcactgacgggacaatggcggg

SEQ ID NO: 15299 - DNA, 201 bp, Homo sapiens
ctaggtgacagagcaagaccctgactcaaaaaaaaaaaaaaaaaaaaaagcccagggaaggcaaggtcactgcccaaggtcacagagggaccttggggtaraagaaaactggcgttccactatctccagggcctcagtagatggaggaggcagtggcctttctctaggactatggaaaagtgtcacctcctcggggacttg

SEQ ID NO: 15300 - DNA, 201 bp, Homo sapiens
ggtgacagagcaagaccctgactcaaaaaaaaaaaaaaaaaaaaaagcccagggaaggcaaggtcactgcccaaggtcacagagggaccttggggtagaaraaaactggcgttccactatctccagggcctcagtagatggaggaggcagtggcctttctctaggactatggaaaagtgtcacctcctcggggacttgggc

SEQ ID NO: 15301 - DNA, 201 bp, Homo sapiens
aatcaccaacaagagagcagcaggcatcctgtgcttactgaaggaggcactcacgtgctcttgccaaaactccccacgcccgtggagctcatggtctggargggaaatggtcatgtttctcctccagaccaccaaagcctctagctcaaaacctaacaatattcaagaaaaagaggacaatgggacgcatgaaaagagacc

SEQ ID NO: 15302 - DNA, 201 bp, Homo sapiens
acagtagatcaatctcccccttaactcctcctcctcaatgtgaagatgacaaggatgtaggcctttatgatgatccacttccacttaatgaaagtaagtarattttctcttccttatgatttccttaataacattttcttttctctggcttactttattgtaagaaaacagtacataatacatataagacagaaaatatgc

SEQ ID NO: 15303 - DNA, 201 bp, Homo sapiens
ccaaggtgggggagccagcgggctttccctgagaacagcaaggcctgtgtacccggggcagagcgagtcaagcgggagaagcaggagcttcacagaaaagsgggcacaggagcacaagaggctcccaacactggccccacccaggacccagagactctgagtcaggaaacaaaaagaaagaggaaaaaaaacaggcctctg

SEQ ID NO: 15304 - DNA, 201 bp, Homo sapiens; identical to SEQ ID NO: 15018

SEQ ID NO: 15305 - DNA, 201 bp, Homo sapiens; identical to SEQ ID NO: 15019

SEQ ID NO: 15306 - DNA, 201 bp, Homo sapiens
agaggcggttgcctgggccaggacagggcagggcagggaagggctggggtgatgcagagggcttggggcccaggccagaggggctgggtgtctccatggaygtgttcttagggtgctcacctgggagacccagaagaaggagataacacgtaagggtgaggctggtccctggaaatcagctgacatcctgcaaatgtggag

SEQ ID NO: 15307 - DNA, 201 bp, Homo sapiens
agggatgtgaactacctcctgccccatccccagccccaggatcctgggacagggcttatgaacgcaaccactgtagtcagctcacttgatccacagcctgrcacctccactgtctggctagggagcctcgaatgggtcccaaggccaccctgctcctcagttacatcatctgcatagtagtggtggttgtgaggaattcag

SEQ ID NO: 15308 - DNA, 100 bp, Homo sapiens
ccagcactgcctggctccacgtgcctcctggtctcagtatggcgctgtcytgggttcttacagtcctgagcctcctacctctgctggaagcccagatccc

SEQ ID NO: 15309 - DNA, 201 bp, Homo sapiens
cctgggctagccctgtcctgagcacatgggcagctgcctcccttctctgggcttccctttccctgctggctgtggtcggacccccactcccggctctgccyttttctcttctgggtccccagggtgaaattctcaccagcccaggggactctggaggcaccccctgcctccaaacacagaagcctcactgcagagtccttc

SEQ ID NO: 15310 - DNA, 201 bp, Homo sapiens
ctccccagatcactggcaagtggttttatatcgcatcggcctttcgaaacgaggagtacaataagtcggttcaggagatccaagcaaccttcttttacttyacccccaacaagacagaggacacgatctttctcagagagtaccagacccggtgagagcccccattccaatgcacccccatctcagcttctggccagaaga

SEQ ID NO: 15311 - DNA, 201 bp, Homo sapiens
ctcctcatcagtaaaaggggggcagagtgagggtcctgagggttagcacatggactgtgtgaagcagacaatgcccagtgcttagcaccggaatcagggtytagcaggtgctccctaaatggcaggtgctgtttgctactgaaagtactggaaggctgggcgccatggctcacgcctgtaatcccagcaatttgggaggct

SEQ ID NO: 15312 - DNA, 201 bp, Homo sapiens
gtcctgctgaccagcagctggagaaatttcagggtgtcaccagcgcaaattctagcagcattagaagcaccatcattattggcaacttctatgtactatgsgctttccatgcattaattcattcaatcctcagcacaacccatttcgcagagaaggaaactgaggcataggtataacccgcccatcctgagttggaaacag

SEQ ID NO: 15313 - DNA, 201 bp, Homo sapiens
tactttggtgggatgctgcggacttggtgcctggagggtggggtggcacgccagggcctggaggggctgcctcagccttgcccaggcctgacatgtgcccrtctctagccagggatgcctggaaacctggtggcttcatagataccatcttctccgtggcctccctggcatgggaagagaagaccatccttgagttctgcc

SEQ ID NO: 15314 - DNA, 201 bp, Homo sapiens
taaaatgaactaagaaagtgaggcaacttatcctgaagaggaaaaggtagagtggagattctgttacccttccagaatcctgaaagagctcagagtttccygggagccagcctagagacacttccaagcacaagtggagggatttggatgagatgcattgccaaaaaggggggtgagacctagcactggtgacaaggagga

SEQ ID NO: 15315 - DNA, 201 bp, Homo sapiens
aacgggagccccagtttcccaatctgccaaatggggaagcccaagtgtttgggtctgatgaccagttcctttctccttggacctacttggagtctgcagcyatgggaatgtggtttccccagagaggatgacctaacaaagccccttccctccctttcccaactcccccgtctcttccaaccctggatctggctcagtggt

SEQ ID NO: 15316 - DNA, 201 bp, Homo sapiens
ccacctcacctctgtgtggtgcttccttctgaccttgggcacctccgtcttcagttgcccctcctgtgaaaggcgaaatgtatcgttgggttctttgaggycctttacagctctgacatcctataacattctgtaacccccacaccttctcctcctctgtttaaactctaatacaatatgttgttttctgcaatacagcca

SEQ ID NO: 15317 - DNA, 201 bp, Homo sapiens
gggggggctggggggagaatgctggcaaggacctaggggctggtgtgggagcggcactgggcgcagaaggtctcactcggcaatggagctggagttcgccygacatttggcaaggaagcccagagccaagatggaacagcaagctggggtgcaggagggagggaggagtgagaatgtgagactttgggggcaggaagcctg

SEQ ID NO: 15318 - DNA, 201 bp, Homo sapiens
atattgctcctaaactgcaattaagctactgtttaccttccccttacccacatccaccccatagttccatttatgagctcccagtctcatttacaaaacakcactctcgcataaactggttgggtggtgggaaggagagggaaaataagtaggagtggtgggaaagagaagatttcagagaactgacaatggcctgagtga

SEQ ID NO: 15319 - DNA, 201 bp, Homo sapiens
gagacttttttcatcacagccctggaaacctatttttgcccccagggggccatattgatccattgagaatgcattcactgatacccaaagctgtagatggmcacacctgcccatgtgacgatcttcaccaatcactccagtaggtaccaagcacttgcttggtgagacccctggacatgaagggcacaggaggcttggaat

SEQ ID NO: 15320 - DNA, 201 bp, Homo sapiens
agagtgtttgccaaggacttggatgaaggcatcaatgcagagatgaaatatactattgtggatggagatggtgcagatgcctttgacattagcacagatcmcaatttccaagttggtatcataactgtgaagaaggtaatccaactcctttttctaaaacactttcatgggtgctttgaatgtttatgaaatgctagtaag

SEQ ID NO: 15321 - DNA, 201 bp, Homo sapiens
aaagaagggaatacttaatcctccttaattagtaattgaagtttcattactattttgtgccataattttcatgactcaatttttaaggatataatggcttyttgtttttgtatcctctaacttgaagaagtttcttgaatttggaaattggattctcagatattattacttttttattttctattatgaatacagaaataa

SEQ ID NO: 15322 - DNA, 201 bp, Homo sapiens
aacacctaaaccaactcttgcaaaaaagaaagtatctgtacatatatccttgctcttcttattgaactaatctatagcatatatatcatgcttagagaaamacagatttagtagatactagtattattcaatacaaaagaagtccgagttttctgagggaaaaagccctgaggattgaaattagaatagaggtacagatat

SEQ ID NO: 15323 - DNA, 201 bp, Homo sapiens
tcttttataagaacaacagcaattagcccaccccaaacacattattgctattcatatcctctagggaaaaacatgaatatgagaaccacctcatttataayaaatgcaaactgattagtatttctgatagaactgttttgtaaaaaacacctctaattgtgaaaagaataatgcgactattgtataacccagcttttacct

SEQ ID NO: 15324 - DNA, 201 bp, Homo sapiens
ctggctgggcgtggtgactcacacctataatcccagcactttgggaggccgaggcaggtagatcacctgaggtcaggagttcaagaccagcctgaccaatrtggccaaacccccactctactaaaaatataaaaactagacaggcatggtggtgcatgcctgtagtcccagctacttgggagcctgaggcaggagaatcgc

SEQ ID NO: 15325 - DNA, 201 bp, Homo sapiens
agttcctggacggaccttatgtggccactgtgccagaaatgtcccctgtgggtaaggtggtgactcgctgattttcacaaatagcacctcctatatatatmcacacacacacacatatgcacatgcacacacacatgtagatacacatatattcagaacaggagagcatgagaggagaagctcaccaattataaagcaacc

SEQ ID NO: 15326 - DNA, 201 bp, Homo sapiens
agcaagtaataataataagcctattaatgttttttagttctgattctttaaaaacaaaatattagctagacagatttgtttcataagggagaaatattttsttattatcaaaagagcaatagggttaggcgcggtggctcacgcctgtaatcctagaactttgggaggctgaggcaggtggatcacaaggtcaggagatcc

SEQ ID NO: 15327 - DNA, 201 bp, Homo sapiens
attgccgggagtcatgttaccccaaacatggcagcttcacaatagcagaacactatacaaggattactggggttttagtcttgcctccgaaaccaatatctttttttttttttttttttgagacagggtcttgctctgtcacccaggctggactgcagtggtgcaatcacagctcactgtagcctcaacccccaggctcaa

SEQ ID NO: 15328 - DNA, 201 bp, Homo sapiens
acaaaataacaaaaaacgtcaaaaagttgagccccagaaaaagtaagttggtaaaaatacgaattcatggagatgaaagtgaactaaatttaattgtgagytcaggatatcatgtccaaaaggagatgaccaactctgagcttcttacatatgtgagaacctttttagtattttattctggaataagaaaacaagaagcat

SEQ ID NO: 15329 - DNA, 201 bp, Homo sapiens
gttagtgggtgcagcgcaccagcatggcacatgtatacatatgtaactaacctgcacaatgtgcacatgtaccctaaaacttaaagtataataataatttwaaaaaaaaagacatttgagaaggcaataaagctcaacatgtgcagtaccaacaatgtgtagaactcccctaaagtacaacatggacagctttgactaggt

SEQ ID NO: 15330 - DNA, 201 bp, Homo sapiens
cagactcaccaagtaaataactactttgttttttttttgtttgtttttttttttgtttttttttttgtttttttttttttttttgagacggagtcttactyttttgcccaggccggactgcagtggtgctatctctgctcactgcaagctccacctcccgggttcacgccattctcctgcctcagtctcccaagtagctgg

SEQ ID NO: 15331 - DNA, 201 bp, Homo sapiens
tgttataaaattatatgaatattttgttatgataaaataagctaattttaatctataatacaaagagggtgataagtagcagagtaaattaaacctccttccccccaaaataaagggcttcagagtaggagaggttgcattctaacaagtgaagaacatttcaactatctctcctgtttttgtaatcaaacaaacatagtc

SEQ ID NO: 15332 - DNA, 201 bp, Homo sapiens
acatttctaggcagagatcaaagcaggaaacagtaaaaagctctccaaacaataaggagacaaaggataatagagataacaaagggcaaatacaggaccayaaacacagttttggcactgaaacagctttattactttagaatgatttagagaaatactttcaggtagggttccctatccataaactgctccccgctatag

SEQ ID NO: 15333 - DNA, 201 bp, Homo sapiens
ccccattgcttagcatagaggattaaaaatacttgggtttaataactttactgaatcctgcaaacacagcatgctcacttcgaatctcacgtctccaaccygcatcaatccaaatcacactccaacctttcaggctcgattcaagcccacgcttccttagagtcctattagtctctttttctctaggaatcccaccctcct

SEQ ID NO: 15334 - DNA, 201 bp, Homo sapiens
gtatgaatgtactccactttctccccttggataaactggggtcttattttgcagtgctgtcaaactgtcactgttcaccagctataacaaagcacaccagaaaaaaaaaaaatcaatagcagttctacagctaaaacctcaacactcttcctggaaaacgttttcagagagataaatagctcaatgggattatctctatct

SEQ ID NO: 15335 - DNA, 201 bp, Homo sapiens
acaatcccacaactccagtcctaggtatttaccccactgaaatgaaattttatgctcacacaaaaacctctatgtaaatattaataggtttactcataacygtcagaaattggaaaaaaacacaaatgtatctctagtgaagaatggataaatcaactgttgtgcatccatacaacagaatactacgtggaaataaaaaaa

SEQ ID NO: 15336 - DNA, 201 bp, Homo sapiens
gcctcccattctgctacaaaaattctatagtctcctcagctactttctctatcatttctcattaaaatgatttattatacagaaatgaaatggcatattgkattaaataattataaaatagtttaaaatttcttttgtacatttcaatcatgagtatttgagaggaagctgaaaccagttctgatgacaggtggaaggtag

SEQ ID NO: 15337 - DNA, 201 bp, Homo sapiens
gtgttgtttttttttttttcccttaaataacatggccttgccaggttgtttagaagtgtcattatatttataactcactttcaattggttgagacacacayacacacacacacacacacacacacacacacacaccccttagttctcaatcatggtcctgttgacatttgggggtggataattctgtgttgttgtggaggg

SEQ ID NO: 15338 - DNA, 201 bp, Homo sapiens
cgacagagcgagactccgtctcaaaaaaaaataaaataaataaacaaacccattttacttaggagttaaaatccttctgtatagagtacagaagaaataaraacttagtaaatgaaaacaacttctggtcagagaactgtgtcccctttcagcatataaaaccatactatccaccctgtccaagacagatccctagtgatg

SEQ ID NO: 15339 - DNA, 201 bp, Homo sapiens
ttttattggactaccacagtactatgtgtcggtcacaatcacatcaaagcagatcatttaatcatcataacaatgctgtgaggtgagtataacacagggarctagactcagagaggttatttatgttcattgcccaaagttagaccgaaggtagcagggaagcccagactgaaatacacatcactcctaccccaaagcccc

SEQ ID NO: 15340 - DNA, 201 bp, Homo sapiens
ctccccccctcctcccttcctctcccccctctatccctctccctccctttccctttcccccctttctccccgccttctcccttcctctcccttcctttccyttccctcctttctctcccctcctccctttctctccccctcttcccctgctcatgtgcacacttgcacatgcagaccggtgctccgaacctcctggaaagc

SEQ ID NO: 15341 - DNA, 201 bp, Homo sapiens
ctcctggaaagctgctcctagctctgttaaccagggctagcaccatccatacggaactttcgccctcccccagacccttcttccaacacagtttcattgcrcacttacaagacgtcaggcccacatcaagatgaaggtcacacggaaagcgaaggcctcacactcaagcgtcagcccagactccagggcaccagccagctc

SEQ ID NO: 15342 - DNA, 201 bp, Homo sapiens
aaatgcctttctattctacacaacaagagatgggcacctctacttttttaactgcataaatagaagatttggattgtaaaaaaaaaaaaaaaagaaagaargaaagaaaaaagaaaatactgtatacgaaatgaggaaatgtgagaacttcacattctaaataaaataagtagaaaaaagcccacaactattttttcggtc

SEQ ID NO: 15343 - DNA, 201 bp, Homo sapiens
cagggctcttaattatataattcaagctttctaccaattttttttgctctactccacacacacacacacacacacacacacacacacacacacatccctaycattatacaaaactagatattgctcctaaactgcaattaagctactgtttaccttccccttacccacatccaccccatagttccatttatgagctcccag

SEQ ID NO: 15344 - DNA, 201 bp, Homo sapiens
ctctcgcataaactggttgggtggtgggaaggagagggaaaataagtaggagtggtgggaaagagaagatttcagagaactgacaatggcctgagtgaacmtgataacagctgaacttttagcctcaggagtgccaccatttttgaggaacttgatggagaaggaattcatagaaagataaataatgagaattagaataag

SEQ ID NO: 15345 - DNA, 201 bp, Homo sapiens
accctgtccaagacagatccctagtgatggactttggtcagtagcagaaacatacacaaacaaatccagaaatgttgaaagtttatttagaggagcactcraactattttctttatgggattctacaatgggaatattgttgtttgtgaaccatacatactgaaatacacgaacaactttttactccaatttatactggtg

SEQ ID NO: 15346 - DNA, 201 bp, Homo sapiens
cagtagcagaaacatacacaaacaaatccagaaatgttgaaagtttatttagaggagcactcaaactattttctttatgggattctacaatgggaatattrttgtttgtgaaccatacatactgaaatacacgaacaactttttactccaatttatactggtgaccacctgtgtcattctctggggttttgtactctatac

SEQ ID NO: 15347 - DNA, 201 bp, Homo sapiens
ctatctaagatctccataaagtctctcttttcttttaagtgcatttttgagactctttctataagcaaaaatgatagcttaagaagtttggctcttaaaaycatgacaccactgtctgcatttacctctcttaaaggcattaggccacatcagaaccttaaaacaccccatcttcttaaacagagtcacggagtcgactga

SEQ ID NO: 15348 - DNA, 201 bp, Homo sapiens
gaagtttggctcttaaaatcatgacaccactgtctgcatttacctctcttaaaggcattaggccacatcagaaccttaaaacaccccatcttcttaaacaragtcacggagtcgactgactgcttctatagagatgtcatttgagctttgctaagcagtagttccattaaccatgaaaagctcaggaaaactggaataatg

SEQ ID NO: 15349 - DNA, 201 bp, Homo sapiens
aacaaactaaacaattcactgaaagcacactttatgtacaactttaatttcttcctactgtgttcattaccaagctgttttctttctttagggaggatgarggggaaacttttaaaagactcatttaacacagaagtcaatttccactaatgtattcttcatgtggcatatgtagtcttccaaagcagatctatatataca

SEQ ID NO: 15350 - DNA, 201 bp, Homo sapiens
ctaatgcactttgaggaattatagatacattgtgtcttacaatatacagaatattgcttttatggtttactaatcacagcattctggcagtggcttttttkttttttgtttgtttgtttgtttgttttggcaatgccctttagtctgccttctaggcccctaaaacagcacagctatttctcactaatctttgtcatcaat

SEQ ID NO: 15351 - DNA, 201 bp, Homo sapiens
actttgaggaattatagatacattgtgtcttacaatatacagaatattgcttttatggtttactaatcacagcattctggcagtggcttttttgttttttktttgtttgtttgtttgttttggcaatgccctttagtctgccttctaggcccctaaaacagcacagctatttctcactaatctttgtcatcaattcgtttc

SEQ ID NO: 15352 - DNA, 201 bp, Homo sapiens
tttgtcatcaattcgtttcctgggttaaattccttcttcccaaacacctccctgtagacagggatcagagaaacatgaactgggcttctctgttccctaarggaagatgtccaccagtccaaagagagagagaacagctaatatttggtaacccacctgctagcagcaccattgttctttattagcaaacccattgccctc

SEQ ID NO: 15353 - DNA, 201 bp, Homo sapiens
agcagcaccattgttctttattagcaaacccattgccctcaatgaggtgcacctggcttgctttttcttaacactcaatctgccttcagagctggagctcrtaagaggcacagcctcccattctgctacaaaaattctatagtctcctcagctactttctctatcatttctcattaaaatgatttattatacagaaatgaa

SEQ ID NO: 15354 - DNA, 201 bp, Homo sapiens
aaaaattctatagtctcctcagctactttctctatcatttctcattaaaatgatttattatacagaaatgaaatggcatattgtattaaataattataaartagtttaaaatttcttttgtacatttcaatcatgagtatttgagaggaagctgaaaccagttctgatgacaggtggaaggtagtaactaagttagcatca

SEQ ID NO: 15355 - DNA, 201 bp, Homo sapiens
atttagtttcacagagctgcaatctccaaatacacacatttgttctcagatgacagcagttcttcgaattaacagtgaaaatattaagccgaaggaagacwttttggttgtcttgacaggttgacttgagtgttatgccatctcattaaaccaagccaagtaagggaagaaaagattgatgaggccatagcccaggagtga

SEQ ID NO: 15356 - DNA, 201 bp, Homo sapiens
aagactttttggttgtcttgacaggttgacttgagtgttatgccatctcattaaaccaagccaagtaagggaagaaaagattgatgaggccatagcccagragtgaggtcaccagctaaatgtgaccgcatagcaacaaaagaagtttgactgataaagatgtgtccccacggtagaagtccttttccctaaatgagtcct

SEQ ID NO: 15357 - DNA, 201 bp, Homo sapiens
gacttgagtgttatgccatctcattaaaccaagccaagtaagggaagaaaagattgatgaggccatagcccaggagtgaggtcaccagctaaatgtgaccrcatagcaacaaaagaagtttgactgataaagatgtgtccccacggtagaagtccttttccctaaatgagtccttcaggtcaagaaaggaaatttgttgac

SEQ ID NO: 15358 - DNA, 201 bp, Homo sapiens
aaatgtgaccgcatagcaacaaaagaagtttgactgataaagatgtgtccccacggtagaagtccttttccctaaatgagtccttcaggtcaagaaaggaratttgttgactagattctcttagcttgctcccataggcatgtgactaatagcactttaaagtctgttgtgaaggatataatgattaactgaccatttaaa

SEQ ID NO: 15359 - DNA, 201 bp, Homo sapiens
caggtcaagaaaggaaatttgttgactagattctcttagcttgctcccataggcatgtgactaatagcactttaaagtctgttgtgaaggatataatgatyaactgaccatttaaatcctggaaaggtcacattagcagcccctatcagtgcttcggagccaaaacagtagagtgtgaaacttgaaatccactgtgagctc

SEQ ID NO: 15360 - DNA, 201 bp, Homo sapiens
gtcacattagcagcccctatcagtgcttcggagccaaaacagtagagtgtgaaacttgaaatccactgtgagctcagaaaatgattaaagtcagaagtgakccctggctgcttataaatgaagtccaagatttctagcattatcaataacagcagtaggcacaagatcattgtgggtgaccaaaaaaaaacaaggtagttg

SEQ ID NO: 15361 - DNA, 201 bp, Homo sapiens
ctgcttataaatgaagtccaagatttctagcattatcaataacagcagtaggcacaagatcattgtgggtgaccaaaaaaaaacaaggtagttggattttmctatttttttaataagcaaagaaaagcagttgggctaatggaaatattagttattagctgtaaatttcgtaaatgaatgctgcttttaagagtttaagag

SEQ ID NO: 15362 - DNA, 201 bp, Homo sapiens
gtgaccaaaaaaaaacaaggtagttggattttcctatttttttaataagcaaagaaaagcagttgggctaatggaaatattagttattagctgtaaatttygtaaatgaatgctgcttttaagagtttaagagcctgtctgatcataaatatttcaaagagcacactattaattcaaaccaatcaataatacagtataacc

SEQ ID NO: 15363 - DNA, 201 bp, Homo sapiens
acgggatctcatttaggaagcataagtgtccaatcaaaaactgtgtatttttttaaatttggaaaatactcaagttccagttgcttatcattctccttcaytttctgaaaacctggcaatcccatgtggacttctggtagaatgagcaatgcaaagaactggcttggacttggcatgtccttgtacttctgggggctgatg

SEQ ID NO: 15364 - DNA, 201 bp, Homo sapiens
gctgggtttggaaccagtttttcgttctggaagagtacactgggaccgaccctttgtatgtcggcaaggtaagaaatgccaagtagaaatgacccgggtaktggatattgaaattgaatatgaattgagtatcaaagttgacctagcctttatctgagacctgagaaaaactagaacaagtggtacgttacttgacaccta

SEQ ID NO: 15365 - DNA, 201 bp, Homo sapiens
gaacaagtggtacgttacttgacacctagctaaaatgtaacttctgctttgtcagagaccagtctgaaaggaaagatttatttccttgtccatgtctctgktatgaatgggaaaaagtgggaattgggatttggaggaaaaggctcagaccctgcaagagctattcaagtcctaaaagaggcagcagcagctgtctgggaa

SEQ ID NO: 15366 - DNA, 201 bp, Homo sapiens
aaagtgggaattgggatttggaggaaaaggctcagaccctgcaagagctattcaagtcctaaaagaggcagcagcagctgtctgggaatgacagaatgggkgagagggaaacttggaaatacaagaagagtacagagttttttgctttgtgtttttgtggggtttttttcagagcatttccagaggtattgcctgaggtgc

SEQ ID NO: 15367 - DNA, 201 bp, Homo sapiens
gaagagtacagagttttttgctttgtgtttttgtggggtttttttcagagcatttccagaggtattgcctgaggtgcaaatttaatgaaaaaaataaaaawaaaacatttttcatttcagaagatcttagcatgtgctttaggatagttggagacaataaatatatttataaatgttatatttgaattctcttgatttaat

SEQ ID NO: 15368 - DNA, 201 bp, Homo sapiens
aagagtacagagttttttgctttgtgtttttgtggggtttttttcagagcatttccagaggtattgcctgaggtgcaaatttaatgaaaaaaataaaaatwaaacatttttcatttcagaagatcttagcatgtgctttaggatagttggagacaataaatatatttataaatgttatatttgaattctcttgatttaatc

SEQ ID NO: 15369 - DNA, 201 bp, Homo sapiens
aacccaggtatctggctttggtccctacctctgacccaaagctgtgttttcattgcttctcaagacctctctactgcccaatcacacctcccagtcacaamctcagacactgctgacctgtctctccttgactcattgtcctatctgtgccatgaccttcacaatcccgtttttccttcttttttctcagccgcgtttgtg

SEQ ID NO: 15370 - DNA, 201 bp, Homo sapiens
ggactcgccacctctgcagttttgaatgccatgtctatgccaatgaatgcaaaacctctatctctggcttagaccactttgggttataaattctactgcayatgtgacatctccacatctactcataggcctttccaatgtagtgtgtccagtaagaaactcttgttttttttctcctaaacgtagtctgccccaacaccc

SEQ ID NO: 15371 - DNA, 201 bp, Homo sapiens
catctccacatctactcataggcctttccaatgtagtgtgtccagtaagaaactcttgttttttttctcctaaacgtagtctgccccaacacccacccatyatttcctaaaaccagagaactggggatcattcctccctttcccctgcccacacattctctccctctgcaaattctgctagtcctatgccagaatcaaccc

SEQ ID NO: 15372 - DNA, 201 bp, Homo sapiens
tggctttagactaagcccagaggacacacacaggagtcagtggtgtttaggtgggatcaggaatctgagccaggctgcttcctgaacccttgatctctcaygctgggtagttcttagctgtgtagcacccttgcatactcacaattagtgctcgccctttccaaataaccccaaccaagatacaagacacccatgcatctc

SEQ ID NO: 15373 - DNA, 201 bp, Homo sapiens
tcgccctttccaaataaccccaaccaagatacaagacacccatgcatctcaacagtcatctgatccaatcctcataccagcaaccaagcgaagatttttascctgcattaggtgtgttacctctacatgaagaagataattatatattcacttttcccttttactttcttttgaaagggaattcatccactttcattctct

SEQ ID NO: 15374 - DNA, 201 bp, Homo sapiens
tacatgaagaagataattatatattcacttttcccttttactttcttttgaaagggaattcatccactttcattctctttacccaggggcattctgcttgygaccttgagctccggaagatgtctgtttagagagcttgccagagtatttgcttatttcagaaaggagtatggcagcaattatcagctgtaattggtatgg

SEQ ID NO: 15375 - DNA, 201 bp, Homo sapiens
catcattcttgtttttgaaatcctcaatcagctaagattcttcaggacctgcttgtacttcccatcactcactactcccttggctgaagatcttaaaaacyaaagaatgattaggataagtgagacattcacttgtcttattctgcctaaaatatttttttaggaaggaaaaaaaacattttcccaagatgtacgtaactg

SEQ ID NO: 15376 - DNA, 201 bp, Homo sapiens
gtcccagggaacaggggcacctcctcgaagctcctgcggccccagcccaaggagcagcactgcttcctcaggggtctcaggcccagcctcaaggggctccsctccaaacctgcagatgccagaatccccacctccctcctgtgttgccccagccagaggggcactggctgtttttcctggagctgcgctctctctctgatg

SEQ ID NO: 15377 - DNA, 201 bp, Homo sapiens
ggccccagcccaaggagcagcactgcttcctcaggggtctcaggcccagcctcaaggggctcccctccaaacctgcagatgccagaatccccacctccctyctgtgttgccccagccagaggggcactggctgtttttcctggagctgcgctctctctctgatgcctcggggcttccttctggcctttcagccctccactc

SEQ ID NO: 15378 - DNA, 201 bp, Homo sapiens
gccccagcccaaggagcagcactgcttcctcaggggtctcaggcccagcctcaaggggctcccctccaaacctgcagatgccagaatccccacctccctcstgtgttgccccagccagaggggcactggctgtttttcctggagctgcgctctctctctgatgcctcggggcttccttctggcctttcagccctccactcc

SEQ ID NO: 15379 - DNA, 201 bp, Homo sapiens
ttttataaccccatgaagacccaacaggattgacacattcacctgggtcattagagaactagaagcattgattgtgaaactggaaagagccttgggggaaycatccagtccatcaccatttgcttatcagataaagcaattgggaaattgagagctactaaagttcatctagtgtagagaggtctcttgacatgtggtctg

SEQ ID NO: 15380 - DNA, 201 bp, Homo sapiens
tcatgaacatggacagagaagccaaagaatactacgaagtgattatccaagccaaggacatgggagggcagcttggaggattagctgggaccacaacagtsaacatcaccctctcagatgtcaatgataacccaccccgctttccccagagtgagtacctaacccaagagagcacagacctcgggcccagagggacgcacc

SEQ ID NO: 15381 - DNA, 201 bp, Homo sapiens
ctccctgtggaatctttttagactttctttcctgattgccacgcccacccaccccacataaaatgcaatactaaggaataagttttgttgggtagaactgrcctttagtgggccacaaactagtaatgctgagacttttttcatcacagccctggaaacctatttttgcccccagggggccatattgatccattgagaatg

SEQ ID NO: 15382 - DNA, 201 bp, Homo sapiens
ccagaaggggaagtcattcatttacttattcattcaaaaaatatttattccaggcactattctatgaatggaacacaaagctgtatacagacaaaacaacrtctctaccatcctggagctcatttgagtaaaaacctgaatggaagaaaaaaaaactgctgcctggaaataagttttcactgtcactttacgttcaaagac

SEQ ID NO: 15383 - DNA, 201 bp, Homo sapiens
catggcagagggtggagtcaaagatgacaatgacgttttcactctggatgacagggagaaggattgtactactaataaaaatagaggacgcataatggaaygagtggcagtgaaggagggagacaaattcagatttgaatatgaagtgacagcaggacaatcaggttgaatgtccttaaggaaagtggaaatatagagcta

SEQ ID NO: 15384 - DNA, 201 bp, Homo sapiens
atttgaatatgaagtgacagcaggacaatcaggttgaatgtccttaaggaaagtggaaatatagagctatgaacgtggaacagagcccaggaatgaagacrtaagtttgagaagcagatgcctgaaggaagcagcgggagaaatgagagcaggaagtgcaattccaggtgaaacacttagctagggaaacggggcttaaaa

SEQ ID NO: 15385 - DNA, 201 bp, Homo sapiens
gtgcaagtaactaagttcctaagttgcttggtccaacagtgcagaattcgtattctgcatcacagaacagtttgtgaaatgccacatggatggactttgtrttgctttggtgattctgtgggttccatcttcattacttcatgaagggctcatattactcacactatagactataaattcttgaacacccttgaactactt

SEQ ID NO: 15386 - DNA, 201 bp, Homo sapiens
tccctgccagcttagtacaaactttaaagatttcctggctcatgtttgtaaagaacaagcatcatttcttctcctgcgcaaggcagggtgctgtgagctgkctgggtgctgtcaacctccctgattctttgtgaaacttgagccctcacacctgaggctatagcttacaaagcatattagaataaaagggaacacgtacat

SEQ ID NO: 15387 - DNA, 201 bp, Homo sapiens
gagccccagaaaaagtaagttggtaaaaatacgaattcatggagatgaaagtgaactaaatttaattgtgagctcaggatatcatgtccaaaaggagatgwccaactctgagcttcttacatatgtgagaacctttttagtattttattctggaataagaaaacaagaagcatgaagggtctgtccatggagaggcaggct

SEQ ID NO: 15388 - DNA, 201 bp, Homo sapiens
ggggtgtaaggacacactgaggggcagcacatggagctgatggagcttgctctccacggctgccccccctttatagatcactgatctccatgacctctgakcaggtgttgctagagacaggcactcagcacacaggccaggccatgaaaaaaaagatggacatttgaagcgtaaacagaataaatacgcactttgtgacca

SEQ ID NO: 15389 - DNA, 201 bp, Homo sapiens
cacactgaggggcagcacatggagctgatggagcttgctctccacggctgccccccctttatagatcactgatctccatgacctctgatcaggtgttgctrgagacaggcactcagcacacaggccaggccatgaaaaaaaagatggacatttgaagcgtaaacagaataaatacgcactttgtgaccacaatgtttatca

SEQ ID NO: 15390 - DNA, 201 bp, Homo sapiens
agctgatggagcttgctctccacggctgccccccctttatagatcactgatctccatgacctctgatcaggtgttgctagagacaggcactcagcacacargccaggccatgaaaaaaaagatggacatttgaagcgtaaacagaataaatacgcactttgtgaccacaatgtttatcactctcagaaggaactgcaattt

SEQ ID NO: 15391 - DNA, 201 bp, Homo sapiens
ggtgttgctagagacaggcactcagcacacaggccaggccatgaaaaaaaagatggacatttgaagcgtaaacagaataaatacgcactttgtgaccacartgtttatcactctcagaaggaactgcaatttaaggaaatacttcagttcactaggaagcactaaaagatttgaatccaaggtacttcctaccactcaagc

SEQ ID NO: 15392 - DNA, 201 bp, Homo sapiens
ttacatgaaaacactggctgtgccatcattttactgaaaaggtaccaggtcatgataaaaatatattataaatatatttctaaatacattccttctacccrgccacttaaaaacctgttgtagcttaactttctaatgatgttaatgacttgatcaacatttgcacttgaataacatatgcattgtagcataccataccta

SEQ ID NO: 15393 - DNA, 201 bp, Homo sapiens
tgggaaatgactgaaggatttttaacagatgtatgacatgactcggttttcattataaatactcagtaggctgtgttgaggtcaggggagtttaaggagaraaggacagaaagagggagaccagctgagaagctattgcagtaatccaggtaagagatgatgagggtttcacctaagtagtgggaatggaggtgataagaa

SEQ ID NO: 15394 - DNA, 201 bp, Homo sapiens
agtctgcaagtagagcaggtggcaggggtgacaagtattggaattcagttctggacatacatgtgacatttctagagtctattagacatcaagtagagacrtgtcatggctttggttataagagcgaggagtttgtagaagggtcctgcactggaaatatgaatctgggaatcataagcatatagatggtacttaaagcaa

SEQ ID NO: 15395 - DNA, 201 bp, Homo sapiens
tggtaaaatagtccttcaaatatatcattaatctgactggcagatttccctgtttatgaaaaccttgccttttcaatgacaactagggaggcaggctggcwggtggagatgggcgtctgggtttgaatggggcttcttggtttggatggaaatggctggcgactcatgaaacgggaagcactatgtctgctactaagtaaa

SEQ ID NO: 15396 - DNA, 201 bp, Homo sapiens
ctttcaattggttgagacacacatacacacacacacacacacacacacacacacacaccccttagttctcaatcatggtcctgttgacatttgggggtggrtaattctgtgttgttgtggaggggttctcctgtgcactgaaccatgtttagcagcatctctggcctttacgcacgaaatgcagtagcactctctgagttg

SEQ ID NO: 15397 - DNA, 201 bp, Homo sapiens
ctcttcttatccttatttttcatattaaagttactttcttttaaaataatgtgtatagttatatgctgcatggctaattcatcatctgcatttttgttacraagaataaatgagatttatattcttaaagagaaaatatctatcaaataattcaaaaaatcaacacatcaccggaagttaaaatgttacagataaaaggcc

SEQ ID NO: 15398 - DNA, 201 bp, Homo sapiens
ttatccttatttttcatattaaagttactttcttttaaaataatgtgtatagttatatgctgcatggctaattcatcatctgcatttttgttacgaagaayaaatgagatttatattcttaaagagaaaatatctatcaaataattcaaaaaatcaacacatcaccggaagttaaaatgttacagataaaaggccatttaa

SEQ ID NO: 15399 - DNA, 201 bp, Homo sapiens
atacaatacattttaccaacgatatatatgcacaactgtatacatgtgtgtattgtatgtatatatatatatatatatatacacacacacacatatatatraaaaacaaaagctttacatcaatatttacccttactgcatgtgatagtttggcatgcatatattctattctatttcattttctttctatgctaatcataa

SEQ ID NO: 15400 - DNA, 201 bp, Homo sapiens
cattctgctcctgcttttgtaagatgctttcctcccctgtgtatgacccagcaaccctacagatcccctaatagtcctcatctactgcccttccccacccyagtatatcctgtggtcctgtggatgctggtgctggatcaatgggctggaatggttttaacatgaaagctggggaagcgcatattgataaggcagggactc

SEQ ID NO: 15401 - DNA, 201 bp, Homo sapiens
caaccagctctgtgcctcaggccccagtctcaccaatatatacacaatacgcaggccagatattctgaaacgactttcccaactatgtttatcaaattacrtagaatcacctatgtgtaacatgcctcaagaaatatgttacctctctatgtgtttggcactacaagcaagctgaaaagtgccggctctgtctccaggcgg

SEQ ID NO: 15402 - DNA, 201 bp, Homo sapiens
cgtagaatcacctatgtgtaacatgcctcaagaaatatgttacctctctatgtgtttggcactacaagcaagctgaaaagtgccggctctgtctccaggcrggataggacaggagggtaatcctggagtgtgagcagcactgatactaggattggctgtgagcaagtttatctccattagtctcctggccctcaccttcct

SEQ ID NO: 15403 - DNA, 201 bp, Homo sapiens
ctcatggttctacaggctgtacaagaagcatggtgccagcatctgcatctagggagggcctcaagctgcttccatgcatggaggaagggggaaggaagccracatgtgcagatcacatggtgagaggaagcaaggcaggaggggaaggtgccaggctctttttaacaatcagctattacaggaacaaagagagtaagaact

SEQ ID NO: 15404 - DNA, 201 bp, Homo sapiens
atctgaagtatttaggtaacatttatcctatgcctactaacatactcaagcccaaccctaaagcaaaattaaatcccaaggtgtgtgatggcatggagacygtgcagggaagtttcacatggaacgggagagttcccttatcccccttgcagaacaggggtgtgccctgctgctcaaacccctaggggaagcatgcagacg

SEQ ID NO: 15405 - DNA, 201 bp, Homo sapiens
aaaaacccctgggggcacatttctaggcagagatcaaagcaggaaacagtaaaaagctctccaaacaataaggagacaaaggataatagagataacaaagrgcaaatacaggaccataaacacagttttggcactgaaacagctttattactttagaatgatttagagaaatactttcaggtagggttccctatccataaa

SEQ ID NO: 15406 - DNA, 201 bp, Homo sapiens
tattactttagaatgatttagagaaatactttcaggtagggttccctatccataaactgctccccgctatagctttgatggaacagaattctaggcccctyttttccaacaagcattcagaccagctaaggggctcatagacccagcacactcttctttgggcacagatgggaaaaggaaggacttttgttctgtagccag

SEQ ID NO: 15407 - DNA, 201 bp, Homo sapiens
caaacatcaattatttgagattaaaagtattacttcaaccccacatgacagttttctgctgtaaaacttgagattctcaaacctgttttcttctaaatggsaaagcattcttctaagtcatcccttcaacctcctacatgtcaccataaaaatactataataattctggaaggaatggtaatatgaattataaaggcagaa

SEQ ID NO: 15408 - DNA, 201 bp, Homo sapiens
aacctcctacatgtcaccataaaaatactataataattctggaaggaatggtaatatgaattataaaggcagaaatacttcaattaaatatcctgaagttyttattgggtcaaaattttgaactattcatttatctgcttcatagggaaactattcccgcaaaaagtgctttcaacctaggattggctttacaaaggcaac

SEQ ID NO: 15409 - DNA, 201 bp, Homo sapiens
gtcaaaattttgaactattcatttatctgcttcatagggaaactattcccgcaaaaagtgctttcaacctaggattggctttacaaaggcaaccctggggrgggaaaataacacattgtaacacattatattttttcttcaactgttcagctaagctatcattctaatgagtgaaacaaaatgcagcaaaatgctgcaaat

SEQ ID NO: 15410 - DNA, 201 bp, Homo sapiens
ctttgcctccctttgacactagggcacttataaggtgttatcaattggagaagcaacgctatttctaaaatatcaaaatatgaaaaactgtgcatcttacwttactgaaatacattaataaaatctgcatatactatcactcaaccagtaaatgttaatactcacattgggaaactttttgcactgttcaatgtaacaatt

SEQ ID NO: 15411 - DNA, 201 bp, Homo sapiens; identical to SEQ ID NO: 2109

SEQ ID NO: 15412 - DNA, 201 bp, Homo sapiens; identical to SEQ ID NO: 2110

SEQ ID NO: 15413 - DNA, 201 bp, Homo sapiens
atttgaggctaggtgtggtggctcatgcctgtaatcctagcatttttggaggctgaggcaggaagatagtttgagcccaggagtttgagaccagcctgggmaacatcgtgagacccaatctctaaaaaagtgaaaaaacaaaaaactatttggaacctacattaccttttatggcctaaacagcactttgagggtggccag

SEQ ID NO: 15414 - DNA, 201 bp, Homo sapiens
cgccatggttgaccactaccagggaatatctgactatcctctttccttcctacaccctgcccctgcccccttgctttcctcaatccaagaaattaattcaycttcccttttccaatcctggaacccctccttctttcagataacacagcacggattctaaccaggaggtctggtttccggcagcaggagcagagtgtcttt

SEQ ID NO: 15415 - DNA, 201 bp, Homo sapiens
tctgactatcctctttccttcctacaccctgcccctgcccccttgctttcctcaatccaagaaattaattcaccttcccttttccaatcctggaacccctscttctttcagataacacagcacggattctaaccaggaggtctggtttccggcagcaggagcagagtgtctttcacctgcctatcctgatagcagatagcg

SEQ ID NO: 15416 - DNA, 201 bp, Homo sapiens
agtcagtttgagccggggcgccctcattgccatcctcgcctgcatctttgtcctcttaggtgagtaaggggctgctttcccttctgtggagtcctgccagwgcgcactcagacatttgttcattaccttcctgacacagctattcagaactggtcttccacaccttgcttactcaaaaggtggtagagtgaggctgcacaa

SEQ ID NO: 15417 - DNA, 201 bp, Homo sapiens
gcctgcatctttgtcctcttaggtgagtaaggggctgctttcccttctgtggagtcctgccagtgcgcactcagacatttgttcattaccttcctgacacrgctattcagaactggtcttccacaccttgcttactcaaaaggtggtagagtgaggctgcacaaaaaacagtaaagaaattgaggacagtcccttcttcga

SEQ ID NO: 15418 - DNA, 201 bp, Homo sapiens
ccttcactttctgaaaacctggcaatcccatgtggacttctggtagaatgagcaatgcaaagaactggcttggacttggcatgtccttgtacttctggggkctgatggaccttacgaccaccgttctctcggacaccccaacaccacaaggtgaattagaagcactcctgtcagacaagccacagtcacatcagcggacca

SEQ ID NO: 15419 - DNA, 201 bp, Homo sapiens; identical to SEQ ID NO: 2112

SEQ ID NO: 15420 - DNA, 201 bp, Homo sapiens
agctgggaccacaacagtgaacatcaccctctcagatgtcaatgataacccaccccgctttccccagagtgagtacctaacccaagagagcacagacctcrggcccagagggacgcacccgttgcagaggtgcgggagaaagcccagtttgagtttcctcattaaattcaattatccatagattcctttcttacattcatc

SEQ ID NO: 15421 - DNA, 201 bp, Homo sapiens
ggaagcttgacctagaaaggggactctcccaatgaagcaaacacatttgcaaatgctttaagatggaccgctcaggattgcatccagcctttagctattakacttgaacaggtttctacctcttctcttccccaggtacctccgtcatccaagtgacagccacagatgcagatgacccgacctacggcaacagtgccaggg

SEQ ID NO: 15422 - DNA, 201 bp, Homo sapiens
cttttgaacgttgacatattttgaatcttgaacctcagtggcgaatcaattttcctgtcattgcttttcagcccctgagttttgaaagcaagaaaagctayaccttaaaggtggagggagccaatcctcacctagagatgcgttttctgaacttgggcccatttcaggacacaacaacagtgcacatcagtgtggaagacg

SEQ ID NO: 15423 - DNA, 201 bp, Homo sapiens
tttcagcccctgagttttgaaagcaagaaaagctacaccttaaaggtggagggagccaatcctcacctagagatgcgttttctgaacttgggcccatttcrggacacaacaacagtgcacatcagtgtggaagacgtggacgagccccctgtgtttgaacctggcttttactttgtggaggtgcctgaggatgtggcgatt

SEQ ID NO: 15424 - DNA, 201 bp, Homo sapiens
cctcacctagagatgcgttttctgaacttgggcccatttcaggacacaacaacagtgcacatcagtgtggaagacgtggacgagccccctgtgtttgaacytggcttttactttgtggaggtgcctgaggatgtggcgattggaacaaccatacagatcatttctgccaaggacccagatgtgaccaacaactcaatcagg

SEQ ID NO: 15425 - DNA, 201 bp, Homo sapiens
ataaaccatatttaaatagcttacaacttccccaagactgtcggcaccctgtttatttcattttttgaatgagaaaattgaagcaatatttgttttgtttrttggaggaggaggtgacttttgtttctgaacaaataaaaccacgaatgcagtcttccagtagccataactcagaagtggtggaaccatgtttcatatggt

SEQ ID NO: 15426 - DNA, 201 bp, Homo sapiens
aactccccgaggtttcagatatccaaaagctatctctgagccctccactcggtagcccttcccctatccgtggtgaatcaagactacttctagtcaccgcrcacacagccacatctcctcggtaaacacactctcctttttgttcctggcagtgctggtgttgctcattttgtccatgaggcggcaccggaaacaaccata

SEQ ID NO: 15427 - DNA, 201 bp, Homo sapiens
gccataactcagaagtggtggaaccatgtttcatatggtaggcactcagttgtctcatgtggtatgctgtcatatgcttacccaaatgcaaatgatgtacrtaatccatgtttctgcagatactccattgatagaagcagtgaccctggaagatttttctatgttgacattacaacaggtgccctaatgacagcaagaccc

SEQ ID NO: 15428 - DNA, 201 bp, Homo sapiens
atcaagactacttctagtcaccgcacacacagccacatctcctcggtaaacacactctcctttttgttcctggcagtgctggtgttgctcattttgtccaygaggcggcaccggaaacaaccatacatcatcgacgacgaggaaaacatccacgagaacatcgtccgctacgacgacgagggcggcggcgaggaggacacc

SEQ ID NO: 15429 - DNA, 201 bp, Homo sapiens
ccagaaaaaaagatattttgcacagcactcctgatatgataatgatgaggcattttttatagtgacggattatcaagaatgcgtgtcctggcttttcttcrtagaacattaccagatgagtgtgttggaatcagctccaattagctccactgtcgggagagtgtttgccaaggacttggatgaaggcatcaatgcagagat

SEQ ID NO: 15430 - DNA, 201 bp, Homo sapiens
gtgagctgagactgcgccactgcagtccagcctgggcgacagagcgagactccgtctcaaaaaaaaataaaataaataaacaaacccattttacttaggarttaaaatccttctgtatagagtacagaagaaataaaaacttagtaaatgaaaacaacttctggtcagagaactgtgtcccctttcagcatataaaaccat

SEQ ID NO: 15431 - DNA, 201 bp, Homo sapiens
taagtaaaatgggtttgttgctatttctcaagagagaaacttgattgggaggtggaatagcattatgacattaagttgcattctgatttaatgttgatgcrccttatggtacactgtcatgtttcattgtactatctaagatctccataaagtctctcttttcttttaagtgcatttttgagactctttctataagcaaaa

SEQ ID NO: 15432 - DNA, 201 bp, Homo sapiens
cctcaatgaggtgcacctggcttgctttttcttaacactcaatctgccttcagagctggagctcgtaagaggcacagcctcccattctgctacaaaaattytatagtctcctcagctactttctctatcatttctcattaaaatgatttattatacagaaatgaaatggcatattgtattaaataattataaaatagttta

SEQ ID NO: 15433 - DNA, 201 bp, Homo sapiens
cactcaatctgccttcagagctggagctcgtaagaggcacagcctcccattctgctacaaaaattctatagtctcctcagctactttctctatcatttctyattaaaatgatttattatacagaaatgaaatggcatattgtattaaataattataaaatagtttaaaatttcttttgtacatttcaatcatgagtatttg

SEQ ID NO: 15434 - DNA, 201 bp, Homo sapiens
gagaccagtctgaaaggaaagatttatttccttgtccatgtctctggtatgaatgggaaaaagtgggaattgggatttggaggaaaaggctcagaccctgmaagagctattcaagtcctaaaagaggcagcagcagctgtctgggaatgacagaatgggggagagggaaacttggaaatacaagaagagtacagagttttt

SEQ ID NO: 15435 - DNA, 201 bp, Homo sapiens
agaggaactttggacaggtcaccaagccctgctcatctcggcttcctcaaattcgaatgagattgagagaactgctccttctcaagtgttgtctacccaakttctttccccagtgtccactcacttcttaacccaggtatctggctttggtccctacctctgacccaaagctgtgttttcattgcttctcaagacctctct

SEQ ID NO: 15436 - DNA, 201 bp, Homo sapiens
cttctcaagacctctctactgcccaatcacacctcccagtcacaaactcagacactgctgacctgtctctccttgactcattgtcctatctgtgccatgaycttcacaatcccgtttttccttcttttttctcagccgcgtttgtgggtcctctccttccacctgaccccatttgttggtgggcttgtcagctttgcccta

SEQ ID NO: 15437 - DNA, 201 bp, Homo sapiens
aattctgctagtcctatgccagaatcaaccccaaatcctgcatttctcttatccctgcttccaccatcatctgtcacctgggcaagtacctagcctcccamccagtctcctcatgtccacctgcacctccctcccatctgttctccaccatggtctttttaaaatttaagtcacatcatgtcactcctctacttacgtctc

SEQ ID NO: 15438 - DNA, 201 bp, Homo sapiens
cccaggtaggttctgcctgccggtagaaggtactagagggagcccaggaggcaggaggagggaggagtgacttgctcctcatcacacctacttctaagagktctgagtcccagggaacaggggcacctcctcgaagctcctgcggccccagcccaaggagcagcactgcttcctcaggggtctcaggcccagcctcaaggg

SEQ ID NO: 15439 - DNA, 201 bp, Homo sapiens
cccaggaggcaggaggagggaggagtgacttgctcctcatcacacctacttctaagaggtctgagtcccagggaacaggggcacctcctcgaagctcctgyggccccagcccaaggagcagcactgcttcctcaggggtctcaggcccagcctcaaggggctcccctccaaacctgcagatgccagaatccccacctccct

SEQ ID NO: 15440 - DNA, 201 bp, Homo sapiens
tgtatacgaaatgaggaaatgtgagaacttcacattctaaataaaataagtagaaaaaagcccacaactattttttcggtcaattttattcccttatttcyctttctagataagacgcagctgagttcccctaggcagcaaaaccattgcctgcatgatttggccttgagtcaatctgagatcagctcaaagccagccaca

SEQ ID NO: 15441 - DNA, 201 bp, Homo sapiens
acagtgttcaggccagatatattggcctccctgccccaagcctaatcctggctgttttatcaaataatctcatgaacttcaccctggactatgcaaagtgytaacaacccaggcaacaatggagtggctgactaaatttaactaactgttttgttaccacctttagaaagagaccattacctatagggttgctcaaaatta

SEQ ID NO: 15442 - DNA, 201 bp, Homo sapiens
taaaaatatagtactcctggactccttttgagagttattaaaagtattctggctgggcgtggtgactcacacctataatcccagcactttgggaggccgasgcaggtagatcacctgaggtcaggagttcaagaccagcctgaccaatgtggccaaacccccactctactaaaaatataaaaactagacaggcatggtggt

SEQ ID NO: 15443 - DNA, 201 bp, Homo sapiens; identical to SEQ ID NO: 2108

SEQ ID NO: 15444 - DNA, 201 bp, Homo sapiens
accagagcaagtaataataataagcctattaatgttttttagttctgattctttaaaaacaaaatattagctagacagatttgtttcataagggagaaatrttttgttattatcaaaagagcaatagggttaggcgcggtggctcacgcctgtaatcctagaactttgggaggctgaggcaggtggatcacaaggtcagga

SEQ ID NO: 15445 - DNA, 201 bp, Homo sapiens
tacattataggggtaaactggggacggattattgttcccagtcccttccattttcatgcaaaaggtctatctagccaagagtcatgttgtaaagctgtagwaagtaagcctttaatctttgcctacagtgtagagaagtcaacttttttaagttgcagggttaaaagggagacaaaacattactgtacaggcttggcagga

SEQ ID NO: 15446 - DNA, 201 bp, Homo sapiens
agccaagagtcatgttgtaaagctgtagtaagtaagcctttaatctttgcctacagtgtagagaagtcaacttttttaagttgcagggttaaaagggagayaaaacattactgtacaggcttggcaggatcacaacacatttcaacggatttggtgtaggcctctcttcttaaatgaaaccgtatctgctgcttgctctct

SEQ ID NO: 15447 - DNA, 201 bp, Homo sapiens
cagcaaaagaaactatcatcaaattcaacaggcaacctacataatgggagaaaatttttgcaatctatccatctgacaaaggtctaatatccagaatctamaaggaacttaaacaaatttacaagaaaaaaaaaaaacaaacaaccacatcaaaaagcgggcaaaggatatgaacagacacttctcaaaagaagacattta

SEQ ID NO: 15448 - DNA, 201 bp, Homo sapiens
gagagggtcacgggggttttgaaacagctctatagcttgattatcacggtagacacatgactgaatacactagtcaaaacctgccaactttatactaaaaragaaattttaatgtatgtaaatatataaatgtatgtaaatatcttattttttaaaacatacaaatttcacacaaaattagaaaaacaatttaaaattaaa

SEQ ID NO: 15449 - DNA, 201 bp, Homo sapiens
ggaaacaaaggctattattccctcaattctggccccattggggaaatcagagagggattcccctcgatgagggaggcttctctgaggaaggctcctggtgygtcagcccggcaatgctgtcaggggtcctgtgggttagttatttctatcactccctctcccatgcgacattcactatattgccgtaggtctgagtataga

SEQ ID NO: 15450 - DNA, 201 bp, Homo sapiens
cactctgatgtgatctggctctgtgtccccacccaaatctcaccttgaattgtaataatctccatgtgtcaagggcgggaccaggtagagataactgaatsatgggggtggtttcccccatgctgttctcatgatagtgagtgagttctcacgagatctgatggttttaaaaggggcttcccccttcccttggcactcatt

SEQ ID NO: 15451 - DNA, 201 bp, Homo sapiens
tcccagccatgctgaactgtgagtcaaacaaacctctttccctataaataccctgtcttgggtatgtctttattagcagtgtgagaacggactaatactcrtatctttaaaagataaagtcttgtttccttagacaatctcttatagactatgtgtcaataaggcagcatggcctggtggctgggagcagaacctgcagcc

SEQ ID NO: 15452 - DNA, 201 bp, Homo sapiens
ttgcaaaaaacaaatacatatgtgaggtaatagacatgttaattagcctgatttgatcattctatgatgtatacatatatctaaataccacattgtacacyataaatatatataattattacttgtcaattaaaaaaataaaaatggctggacacggtggctcacacctgtaatcccggcactttgggaggctgaggcagg

SEQ ID NO: 15453 - DNA, 201 bp, Homo sapiens
gttttttgacacttgctccctttgtctcacccttcccttcatactgctgatagcaaaggttcaccaacacacaccttattctgtccaaacttctcatgtcyggccacactcttagtaggcaacacatggatcctatgctcttgctaccatctccatgtacttcatcctctcctttcaaatccagactcaccaagtaaataa

SEQ ID NO: 15454 - DNA, 201 bp, Homo sapiens
taaggtggcctgtgggtggtgcactctgcttaacccctaacttctggaaacaattgttagataaccaaattcaccatcaaagccattttgactccagaaaygaacagttcacaaaacagagtccctaattcccgtatatcaggtttcaaccatttatttgttaagacaactatttgaggctaggtgtggtggctcatgcct

SEQ ID NO: 15455 - DNA, 201 bp, Homo sapiens
tgggctggaatggttttaacatgaaagctggggaagcgcatattgataaggcagggactcatgcattggtaattctggcccctgactgtaatctaactttkccttcatgtattagtccattttcatgctgctgataaagacatacccaagactgagtaatttataaagaaaaagaaggttaatggactcacagttccacgt

SEQ ID NO: 15456 - DNA, 201 bp, Homo sapiens
cagtcatgtaaaattatgactgcaagtgaacaatgatcgagagggaagatgcaaaaatagtataattactgtgctaaggtagttgagtttaagtgaggagktttgggtctttattttaataatttttgttttatattataaaatttatatatatgtaatataaacttgttataaaattatatgaatattttgttatgataa

SEQ ID NO: 15457 - DNA, 201 bp, Homo sapiens
ggaaatgttttgaagatttttcaaaagcatacagctcagagatacatctggtttataaagtatcgggcctccttgtgtttacttgttggatactgtcctcmgcttcacatctgacaagtccagacacatgcttccctcttagtaagcagccttgaaggaagcccataaagaaatcagataacatacttggtgatggacaag

SEQ ID NO: 15458 - DNA, 201 bp, Homo sapiens
catggaggaagggggaaggaagccgacatgtgcagatcacatggtgagaggaagcaaggcaggaggggaaggtgccaggctctttttaacaatcagctatyacaggaacaaagagagtaagaactcaactcatcaccaggacgactgcaccaaaacattcatgagggatccacctggatgaccccaacacctcccaccagg

SEQ ID NO: 15459 - DNA, 201 bp, Homo sapiens
atcagctattacaggaacaaagagagtaagaactcaactcatcaccaggacgactgcaccaaaacattcatgagggatccacctggatgaccccaacaccycccaccaggccccacctccaacaatggggatcagatttcaacatgagatttggtggggtcaaatatgcaaaccataggagtgggtaggtggctctctgca

SEQ ID NO: 15460 - DNA, 201 bp, Homo sapiens
cacctggatgaccccaacacctcccaccaggccccacctccaacaatggggatcagatttcaacatgagatttggtggggtcaaatatgcaaaccataggrgtgggtaggtggctctctgcaattggcaatccctaaagggactggtaggtgacggggaaaaatccttcattgaagggggatctgagcaacacagtgtcca

SEQ ID NO: 15461 - DNA, 201 bp, Homo sapiens
acaaaatgtgactctctgtgacccattccctcatgtctgttttctgttaacctgacatggccaatgccaatgggtcactcacttctcttcaggtcatggtyattcttaaataggggcttcttaaagacagcaatttagccctgaaatattgggccagtgatgaggttaagtagatgaggtgagaagaaaatatggggtcaa

SEQ ID NO: 15462 - DNA, 201 bp, Homo sapiens
cctgagcaacacaccaagaccccatccctaacaattttttttaagtagccagacatggtggcatgcacctgtagtcccagctacttgggaggctaaggtgrgaggatcatttgagcccaggagttcaaggctgcagtgagctatgatcagaccactgtactccagactgggtgacagagtaagatcctgtctctaaaaaaa

SEQ ID NO: 15463 - DNA, 201 bp, Homo sapiens
tgaggcaggagaatggcgtgaacccgggaggcggagcttgtagtgagctgagactgcgccactgcagtccagcctgggcgacagagcgagactccgtctcaaaaaaaaataaaataaataaacaaacccattttacttaggagttaaaatccttctgtatagagtacagaagaaataaaaacttagtaaatgaaaacaact

SEQ ID NO: 15464 - DNA, 201 bp, Homo sapiens
gaggctgaggcaggtggatcacaaggtcaggagatcctggccaacatggtgaaaccccgtctctactaaataccctgtctctactaaaacaccaaaaaaawtagcctggtgtggtggtgcgcacctatagtcccagctactcaggaggctgaggcaggggaatcacttgaacccgggaggtggagatttcagtgagctgag

SEQ ID NO: 15465 - DNA, 201 bp, Homo sapiens
gtctctactaaaacaccaaaaaaattagcctggtgtggtggtgcgcacctatagtcccagctactcaggaggctgaggcaggggaatcacttgaacccggsaggtggagatttcagtgagctgagatcacgccactgcactccagcctggcgacagagtgagactccatcttaaaaaaaaaaaaaaaaaaaaaaaaaaaag

SEQ ID NO: 15466 - DNA, 201 bp, Homo sapiens
ataatggaatactacacagccataaaaaggaatggactaacagcattttcagtgacctggatgagattggagactattattattattattattatttttcrtgttcgagacagagtctcactttgtcacccaggctggagtacagtggcgcaatctcggctcactgcaacctccgcctcccaggttcaagcaattctcctg

SEQ ID NO: 15467 - DNA, 201 bp, Homo sapiens
gggattacaggcgtgagccactgcacccagctgattggagactattattctaagtgatgtaactccagaatggaaaaccaaacatattctgttttcattgwtatgtaggagctaagctttgagggcgcaaaggcataagaatgatacagtggactttggggacttggaggaaagagtggtagaggggcaagggataaaaga

SEQ ID NO: 15468 - DNA, 201 bp, Homo sapiens
cagctgattggagactattattctaagtgatgtaactccagaatggaaaaccaaacatattctgttttcattgatatgtaggagctaagctttgagggcgyaaaggcataagaatgatacagtggactttggggacttggaggaaagagtggtagaggggcaagggataaaagactacaaatatggtgcagtatatactgc

SEQ ID NO: 15469 - DNA, 201 bp, Homo sapiens
gttcctctccacatttagcgcttacttcaggagctcttttagggcaggcctggtggtgaccaaacctctcagcatttgcttgtctgtaaaggattttattyctccttcacttatgaagcttagtttggctggatatgaaattctgggttgaaaatttttttctttaagaatgttgaatattggcccccactctcttctggc

SEQ ID NO: 15470 - DNA, 201 bp, Homo sapiens
gaagccttcttctctcagctcgtcaaagtcattctccatccagctttgttccgttgctggtgaggaactgcgttcctttggaggaggagaggcgctctgckttttagagtttccagtttttctgttctgttttttccccatctttgtggttttatctacttttggtctttgatgatggtgatgtacagatgggtttttggt

SEQ ID NO: 15471 - DNA, 201 bp, Homo sapiens
gtgtggatgtcctttctgtttgttagttttccttctaacagacaggaccctcagctgcaggtctgttggaataccctgccgtgtgaggtgtcagtgtgccyctgctggggggtgcctcccagttaggctgcttgggggtcaggggtcagggacccacttgaggaggcagtctgcccattctcagatctccagctgcgtgct

SEQ ID NO: 15472 - DNA, 201 bp, Homo sapiens
ttctaacagacaggaccctcagctgcaggtctgttggaataccctgccgtgtgaggtgtcagtgtgcctctgctggggggtgcctcccagttaggctgctygggggtcaggggtcagggacccacttgaggaggcagtctgcccattctcagatctccagctgcgtgctgggagaaccactgctctcttcaaagctgtcag

SEQ ID NO: 15473 - DNA, 201 bp, Homo sapiens
tgccgtgtgaggtgtcagtgtgcctctgctggggggtgcctcccagttaggctgcttgggggtcaggggtcagggacccacttgaggaggcagtctgcccrttctcagatctccagctgcgtgctgggagaaccactgctctcttcaaagctgtcagacagggacatttaagtctgcagaggttactgctgtctttttgtt

SEQ ID NO: 15474 - DNA, 201 bp, Homo sapiens
gccctgcccccagaggtggagcctacagaggcaggcaggcctccttgagctgtggtgggctccacccagttcgagcttcctggctgctttgtttacctaakcaagcctgggcaatggcgggcgcccctcccccagactcgctgccaccttgcagtttgatctcagactgttgtgctagcaatcagcgagactccgtgggcc

SEQ ID NO: 15475 - DNA, 201 bp, Homo sapiens
ggagcctacagaggcaggcaggcctccttgagctgtggtgggctccacccagttcgagcttcctggctgctttgtttacctaatcaagcctgggcaatggygggcgcccctcccccagactcgctgccaccttgcagtttgatctcagactgttgtgctagcaatcagcgagactccgtgggcctaggaccctcggagcca

SEQ ID NO: 15476 - DNA, 201 bp, Homo sapiens
ctttgtttacctaatcaagcctgggcaatggcgggcgcccctcccccagactcgctgccaccttgcagtttgatctcagactgttgtgctagcaatcagcragactccgtgggcctaggaccctcggagccaggtgcgggatataatctcgtggtgcgccattttttaagcccgtcggaaaagcgcaatattcgggtagga

SEQ ID NO: 15477 - DNA, 201 bp, Homo sapiens
ggtaggagtgacccgattttccaggtgctgtccgtcacccctttctttgactcggaaagggaactccctgaccccttgtgcttcccaagtgaggcaatgcytcgccctgcttcggctcgcgcactgtgcgcgcacccactgacctgcgcccactgtctggcactccctagcgagatgaacccggtacctcagatggaaatg

SEQ ID NO: 15478 - DNA, 201 bp, Homo sapiens
gtgctgtccgtcacccctttctttgactcggaaagggaactccctgaccccttgtgcttcccaagtgaggcaatgcctcgccctgcttcggctcgcgcackgtgcgcgcacccactgacctgcgcccactgtctggcactccctagcgagatgaacccggtacctcagatggaaatgcagaaatcacccgtcttctgcgtt

SEQ ID NO: 15479 - DNA, 201 bp, Homo sapiens
gtccgtcacccctttctttgactcggaaagggaactccctgaccccttgtgcttcccaagtgaggcaatgcctcgccctgcttcggctcgcgcactgtgcrcgcacccactgacctgcgcccactgtctggcactccctagcgagatgaacccggtacctcagatggaaatgcagaaatcacccgtcttctgcgttgctca

SEQ ID NO: 15480 - DNA, 201 bp, Homo sapiens
cctgcgcccactgtctggcactccctagcgagatgaacccggtacctcagatggaaatgcagaaatcacccgtcttctgcgttgctcacgctgggagctgyagaccggagctgttcctattcggccatcttggctcctccccaccaaatgtccaacaatgatagactggattaagaaaatgtggcacatatacaccatgga

SEQ ID NO: 15481 - DNA, 201 bp, Homo sapiens
agccataaaaaatgatgagttcatgtcctttgtagggacatggatgaaattggaaatcatcattctcagtaaactatcgcaagaacaaaaaaccaaacacygcatattctcactcataggtagaattgaacaatgagatcacatggacacaggaaggggaatatcacactctggggactgttgtggggtcgggggaggggg

SEQ ID NO: 15482 - DNA, 201 bp, Homo sapiens
accagcatggcacatgtatacatatgtaactaacctgcacaatgtgcacatgtaccctaaaacttaaagtataataataattttaaaaaaaaagacatttkagaaggcaataaagctcaacatgtgcagtaccaacaatgtgtagaactcccctaaagtacaacatggacagctttgactaggtctggcttgcatgggcag

SEQ ID NO: 15483 - DNA, 201 bp, Homo sapiens
atttctgcatttccatctgaggtacccggctcatctcaatgggagtggttagatagtgggtgcagcccagggagggcaagctgaagcagggtggggcgttrcctcacctgggaagtgcaaggggtcagggaactccctctcctagccaggggaagccatgggggattgtgctgtaaggaacagtgcattctggcccagata

SEQ ID NO: 15484 - DNA, 201 bp, Homo sapiens
catccagcaggtgcccctctgtgaagaagcttcaagaggaaggatcaggcagcaatctttgctgttctgcagcctccgctggtgatacccaggcaaacagrgtctggagcggacctccagcaaactccagcagacctgcagcagagggacctaactgttagaatgaaaactaacaaacagaaaggaataacattaatatca

SEQ ID NO: 15485 - DNA, 201 bp, Homo sapiens
acacttttcagggtattatccaggagaacttccccaacctagcaagataggccaacattcaaattcaggaaatacagagaacaccacaaagatactcctcsagaagagcaaccccaagacacataatcgtcagattcaccaaggttgaaatgaaggaaaaaatgttaagggcagccagagagaaagatgaggtacccacaa

SEQ ID NO: 15486 - DNA, 201 bp, Homo sapiens
cttgaactcagctctggaccaagcagacctaatagacctctacagaactctccaccccaaaatcaacagaatatacattcttctcagcacgacatcaccautctaaaattgaccacataattggaagtaaaacactcctcagcaaatgcaaaataatggaaatcataacaaacagtatctcagaccacaatgcaatcaaat

SEQ ID NO: 15487 - DNA, 201 bp, Homo sapiens
aaaaaccctagaagaaaacttaggcaataccattcaggacataggcatgggcaaaggctttgactaaaacaccaaaagcaatggcaacaaaagccaaaatygacaaatgggattgaattaaactaaagagcttctgcacagcaaaagaaactatcatcaaattcaacaggcaacctacataatgggagaaaatttttgcaa

SEQ ID NO: 15488 - DNA, 201 bp, Homo sapiens
gaacagacacttctcaaaagaagacatttatgcagccaacaaacatgaaaaatagctcatcatcactggtcattagagaaatgcaaatcagaactatattragataccatcttatgccagttagaatggtgatcattaaaaaagtcaggaaacaacagatgcaggagaggatgtggagaaataggaatgcttttttacact

SEQ ID NO: 15489 - DNA, 201 bp, Homo sapiens
tagaatggtgatcattaaaaaagtcaggaaacaacagatgcaggagaggatgtggagaaataggaatgcttttttacactgttggtgggagtgtaaattarttcaaccattgtggaagacaatgtggtgattcctcaaggatctagaaccagaaataccatatgacccagcaatcccattactgggtatatacccaaagga

SEQ ID NO: 15490 - DNA, 201 bp, Homo sapiens
atgtttattacagcactgttcacaatagcaaagacttggaaccaacccaaatgcccatcaatgacagactggataaagaaaatgtggcacatatacaatayggaatactatgcagccataaaaaaggaggagttcatgtccttttcagggacatggatgaaaccaccattctcagcaagctaacacatggacagaaaacta

SEQ ID NO: 15491 - DNA, 201 bp, Homo sapiens
tgttgtttttttttttttcccttaaataacatggccttgccaggttgtttagaagtgtcattatatttataactcactttcaattggttgagacacacatmcacacacacacacacacacacacacacacacaccccttagttctcaatcatggtcctgttgacatttgggggtggataattctgtgttgttgtggagggg

SEQ ID NO: 15492 - DNA, 201 bp, Homo sapiens
aatcatgggggtggtttcccccatgctgttctcatgatagtgagtgagttctcacgagatctgatggttttaaaaggggcttcccccttcccttggcactyattctctctcctaccaccatgtgaaggacatgtttgcgtccctttccactacgattgtaagtgtgctgaggccttcccagccatgctgaactgtgagtca

SEQ ID NO: 15493 - DNA, 201 bp, Homo sapiens
aaaaaaatatacattgtatttgatacaatacattttaccaacgatatatatgcacaactgtatacatgtgtgtattgtatgtatatatatatatatatatatacacacacacacatatatatgaaaaacaaaagctttacatcaatatttacccttactgcatgtgatagtttggcatgcatatattctattctatttcat

SEQ ID NO: 15494 - DNA, 201 bp, Homo sapiens
cattgcaaaaaacaaatacatatgtgaggtaatagacatgttaattagcctgatttgatcattctatgatgtatacatatatctaaataccacattgtacrctataaatatatataattattacttgtcaattaaaaaaataaaaatggctggacacggtggctcacacctgtaatcccggcactttgggaggctgaggca

SEQ ID NO: 15495 - DNA, 201 bp, Homo sapiens
cactttgggaggctgaggcaggtggatcacttgaggtcaggagtttgagacccgactggccaacgtggcaaaaccttgtctctactaaaaatataaaaatyagccagggatggtggcaggcacctgtaatcccagttacttgggaggctgcggcaggagaatcacttgaacccaggaggcagaggctacagtgagctgaca

SEQ ID NO: 15496 - DNA, 201 bp, Homo sapiens
ttcttttggcattactaaactctcagatttggttttccttgtgttccctttagacaatccctcccaggttggaagtgttcctgtcacaatcaaagtcttaratgtgaatgacaatgctccagagttccccagattctatgaagcttttgtctgtgagaacgccaaggcaggacaggtaaggtggcctgtgggtggtgcact

SEQ ID NO: 15497 - DNA, 201 bp, Homo sapiens
cagacttagcgatttgtatcttcactcactcatgctttaaagccctgtaagcaaccagctctgtgcctcaggccccagtctcaccaatatatacacaataygcaggccagatattctgaaacgactttcccaactatgtttatcaaattacgtagaatcacctatgtgtaacatgcctcaagaaatatgttacctctctat

SEQ ID NO: 15498 - DNA, 201 bp, Homo sapiens
atcaggtggatggttggctatctgtgcttttctacagcataggccagctactttgggttactgtcttatgcaaacagtgtcaaaggctacctgttccataccagcagggaggatgttaataattcagtgtattttttttttttttttgagatggggtctatgttggccaggttggtcttgaactcttggcttcaagcagtc

SEQ ID NO: 15499 - DNA, 201 bp, Homo sapiens
caggtggatggttggctatctgtgcttttctacagcataggccagctactttgggttactgtcttatgcaaacagtgtcaaaggctacctgttccataccagcagggaggatgttaataattcagtgtattttttttttttttttgagatggggtctatgttggccaggttggtcttgaactcttggcttcaagcagtcct

SEQ ID NO: 15500 - DNA, 201 bp, Homo sapiens
tattttttttttttttttgagatggggtctatgttggccaggttggtcttgaactcttggcttcaagcagtcctcccatctcagcctcccaaagtgctagkattacagacatgagccaccgtgcccagcctcacagtgtcttttaaagttttgtttcagaacaacaaacacagagaaccctttgccaactctaaaactcat

SEQ ID NO: 15501 - DNA, 201 bp, Homo sapiens
aatccttcattcccactggtagcagccctgttcatatgttctgtaacaacgggaaaaatctgagaaagatagaaagtgatctaggataaaaaataaaatamaataaaataaaaaacccctgggggcacatttctaggcagagatcaaagcaggaaacagtaaaaagctctccaaacaataaggagacaaaggataatagag

SEQ ID NO: 15502 - DNA, 201 bp, Homo sapiens
tgggggcacatttctaggcagagatcaaagcaggaaacagtaaaaagctctccaaacaataaggagacaaaggataatagagataacaaagggcaaatacrggaccataaacacagttttggcactgaaacagctttattactttagaatgatttagagaaatactttcaggtagggttccctatccataaactgctcccc

SEQ ID NO: 15503 - DNA, 201 bp, Homo sapiens
tgaacaagtctaggcacagtggctcatgcctgttactccaacactttgggaggctgaggcaggagaactgcttgataccaagagttcaagaccagcctggrcaacacagcaagaccctatctctgaaaaacatattttaaaaattagccaggcatggtggcacacacctgtagtcacagctagttgggagcctgggacagg

SEQ ID NO: 15504 - DNA, 201 bp, Homo sapiens
ccaagaccagagtcaataagctgaataagcattaaaactgggattagaaattgagtcctgttttaccatgcccccccactacacccccgccccacacacacagtgttctgtgtcacctcagaaaaaaatgctgtttccaaataagttactaaagtcctcattatcacattcaacaaaaattttccaagtggctactatatg

SEQ ID NO: 15505 - DNA, 201 bp, Homo sapiens
ttgttcttttctgtcaagctttcccagggacatttttgttagatctgaagtctgacagtttgccttgggcactttatgtcacaaaggataagacagactcaaaaaaaaaagaggctttctcttcttaggcctcagggttttgcctaaaagcaagcaaaaagcatggtttctgaatccaaatgctgatccaggcaaacccgc

SEQ ID NO: 15506 - DNA, 201 bp, Homo sapiens
cattaaaaataattcatcaaactttaagatttgacttgcatttgtcaacaaaatactatattttatagacaactaaataaattaattctgacttcctgggtttttttttttcatgtctcatatatgtatctagtgcctagaaaatctcataagctctacgcaccgtgcctatagtacacgaagaataaaccatccctagaa

SEQ ID NO: 15507 - DNA, 201 bp, Homo sapiens
attaaaaataattcatcaaactttaagatttgacttgcatttgtcaacaaaatactatattttatagacaactaaataaattaattctgacttcctgggtttttttttttcatgtctcatatatgtatctagtgcctagaaaatctcataagctctacgcaccgtgcctatagtacacgaagaataaaccatccctagaac

SEQ ID NO: 15508 - DNA, 201 bp, Homo sapiens
acaatggttgaactagtttacactcccaccaacactgtaagagtgttactatttctccatatcctcaccagcacctgttgtttcctgactttttaatgatygccattcttactggtatgagatggtatctcattgtggttttgatttgcatttctctgagggccagtgatgatgagcattttttcatgtgtctgttggctg

SEQ ID NO: 15509 - DNA, 201 bp, Homo sapiens
gttttttccaattctgtgaagaaagtcattggtagcttgatggggatggcattgaatctataaattaccttgggcagtatggccattttcatgatattgaytctccctatccataagcttggaatgttcttccatttgtttgtgtcctcttttattttgttgagcactggtttgtagttctccttgaagaggtccttcaca

SEQ ID NO: 15510 - DNA, 201 bp, Homo sapiens
tccataagcttggaatgttcttccatttgtttgtgtcctcttttattttgttgagcactggtttgtagttctccttgaagaggtccttcacatcccttgtragttggattcctaggtattttattctctttgaagcaattgtgaatgagactgcactcatgatttggctctctgcttgtctgttattggtgtataagaatg

SEQ ID NO: 15511 - DNA, 201 bp, Homo sapiens
ttgaagaggtccttcacatcccttgtaagttggattcctaggtattttattctctttgaagcaattgtgaatgagactgcactcatgatttggctctctgyttgtctgttattggtgtataagaatgcttgtgatttttgcacattgattttgtatcctgagactttgctgaagttgcttatcagtttaaggagatttttg

SEQ ID NO: 15512 - DNA, 201 bp, Homo sapiens
tgggtgggagggtgggtgaaggaagagacattgactttatgctcaagtttagtggctgaaccaagagatgttggcattacagctcatccaacgccatcaasttagagtgctcgtgtctcctctcagctatttaactgtgcccctgcaaaattgttcagaatgaaaccagaaaaatctgcctcttttgcactgtagatgtct

SEQ ID NO: 15513 - DNA, 201 bp, Homo sapiens
ctgttgtgaaggatataatgattaactgaccatttaaatcctggaaaggtcacattagcagcccctatcagtgcttcggagccaaaacagtagagtgtgaracttgaaatccactgtgagctcagaaaatgattaaagtcagaagtgatccctggctgcttataaatgaagtccaagatttctagcattatcaataacagc

SEQ ID NO: 15514 - DNA, 201 bp, Homo sapiens
acccaagactgagtaatttataaagaaaaagaaggttaatggactcacagttccacgtggctggggaggcctcacaatcacggtggaaggcgaaaggcacrtcttacatggcagcaggcaagacagactaagagccaagtgaaaagggaaaccccttataaaactatcagatcttgtgagacttattcactaccatgaaaa

SEQ ID NO: 15515 - DNA, 201 bp, Homo sapiens
cacattagcagcccctatcagtgcttcggagccaaaacagtagagtgtgaaacttgaaatccactgtgagctcagaaaatgattaaagtcagaagtgatcyctggctgcttataaatgaagtccaagatttctagcattatcaataacagcagtaggcacaagatcattgtgggtgaccaaaaaaaaacaaggtagttgga

SEQ ID NO: 15516 - DNA, 201 bp, Homo sapiens
tgtgactaatagcactttaaagtctgttgtgaaggatataatgattaactgaccatttaaatcctggaaaggtcacattagcagcccctatcagtgcttcrgagccaaaacagtagagtgtgaaacttgaaatccactgtgagctcagaaaatgattaaagtcagaagtgatccctggctgcttataaatgaagtccaaga

SEQ ID NO: 15517 - DNA, 201 bp, Homo sapiens
tccttgagtttccataaggtggcattgggagtcctttagcacagaagtggacgacctgtaagaggcctttgaagaaacttgttcctgggaggaatttccaractggctgtccttacttctatctttggaaaatgtcgaagttaaaagttcaccctggcccacaaaaagccatcattacagaaatactgatttaaagagact

SEQ ID NO: 15518 - DNA, 201 bp, Homo sapiens
aagaaaagattgatgaggccatagcccaggagtgaggtcaccagctaaatgtgaccgcatagcaacaaaagaagtttgactgataaagatgtgtccccacrgtagaagtccttttccctaaatgagtccttcaggtcaagaaaggaaatttgttgactagattctcttagcttgctcccataggcatgtgactaatagcac

SEQ ID NO: 15519 - DNA, 201 bp, Homo sapiens
tgaccaaaaaaaaacaaggtagttggattttcctatttttttaataagcaaagaaaagcagttgggctaatggaaatattagttattagctgtaaatttcrtaaatgaatgctgcttttaagagtttaagagcctgtctgatcataaatatttcaaagagcacactattaattcaaaccaatcaataatacagtataaccc

SEQ ID NO: 15520 - DNA, 201 bp, Homo sapiens
ccttcaggtcaagaaaggaaatttgttgactagattctcttagcttgctcccataggcatgtgactaatagcactttaaagtctgttgtgaaggatataaygattaactgaccatttaaatcctggaaaggtcacattagcagcccctatcagtgcttcggagccaaaacagtagagtgtgaaacttgaaatccactgtga

SEQ ID NO: 15521 - DNA, 201 bp, Homo sapiens
aaggttctctctcgagaaatagaaaaaaacccattttggccaggtgcggtggctcacgcctgtaatcccagcactttgggaggccgaggtgggcggatcaygaggtcaggagatcgagaccatcctggctaacatggtgaaacccggtctctactaaaaatacaaaaaattagccaggtgtggtggcgggcacctgcagtc

SEQ ID NO: 15522 - DNA, 201 bp, Homo sapiens
ttgggaggccgaggtgggcggatcatgaggtcaggagatcgagaccatcctggctaacatggtgaaacccggtctctactaaaaatacaaaaaattagccrggtgtggtggcgggcacctgcagtcccagctactcgggaggctgaggcaggagaatggcgtgaacccgggaggcggagcttgtagtgagctgagactgcg

SEQ ID NO: 15523 - DNA, 201 bp, Homo sapiens
gaggctgaggcaggagaatggcgtgaacccgggaggcggagcttgtagtgagctgagactgcgccactgcagtccagcctgggcgacagagcgagactccrtctcaaaaaaaaataaaataaataaacaaacccattttacttaggagttaaaatccttctgtatagagtacagaagaaataaaaacttagtaaatgaaaa

SEQ ID NO: 15524 - DNA, 201 bp, Homo sapiens
ttttaccttctagaaagttaggcagggagtctttttcatgcattcatccctaaggaagtagaaataaagtgctttgcaccaactgttgctatcaagttatrtaagacagaaagagttggtacgacattgcggtctttgtgatttggggtgtgtaaaggtaccatcagctttcacagaatcaccaagggctcccccggtcaa

SEQ ID NO: 15525 - DNA, 201 bp, Homo sapiens
gttaattacagaccattttgtgaaagcaaccaagtgagagagaatgggagacaagaaactaattagaaaataactaattcattcaaatggtaacttaaacrcttgtttagcacagaggctgggagcatgggtttcagattcaaacacaggtgggttcaaagcccagccctgccaattatttctagaggaactttggacagg

SEQ ID NO: 15526 - DNA, 201 bp, Homo sapiens
gcttgtttagcacagaggctgggagcatgggtttcagattcaaacacaggtgggttcaaagcccagccctgccaattatttctagaggaactttggacagrtcaccaagccctgctcatctcggcttcctcaaattcgaatgagattgagagaactgctccttctcaagtgttgtctacccaagttctttccccagtgtcc

SEQ ID NO: 15527 - DNA, 201 bp, Homo sapiens
actacatatattccacatactatagaaagagcagacatagaaactacttctgttgtcagcaacttcaatgccttgtagactggccagacagatgggtcttygtatggcaataccaagtatctatctctccaaagcatgttttggaattaaagattccaaccaagatgcttccgctcaagaagatgagaactgctcttacag

SEQ ID NO: 15528 - DNA, 201 bp, Homo sapiens
ctcagcaatgtgatgctctgatatttttctttaatcttaaataattcttagatcaagaaacatatatatcgtaggtataatacttttatgaatttcggctytagtcagactttctaaaagtctcatgacctcacctggattaaaccaaaaaaattaaaaaaaagttctgattagagaaaaacctgctttctgaaaaaacaa

SEQ ID NO: 15529 - DNA, 201 bp, Homo sapiens
tgctctgatcttagttatttcttgccttttgctagcttttgaatgtgtttgctcttgcttctctagttcttgcttctctagggtgttgattttagatcttwcctgctttctcttgtgggcattcagtgctataaatttccctctacacactgctttaaatgtgtcccagagattctggtatgttgtgtctttgttctcatt

SEQ ID NO: 15530 - DNA, 201 bp, Homo sapiens
ttaaaagtaaataacaatttatgcttaaaaagtaataatctagtccattttaaatgaactctgaagcatgtgtttttctttattaaaaaggcaactattcrctgtcactctgatgtgatctggctctgtgtccccacccaaatctcaccttgaattgtaataatctccatgtgtcaagggcgggaccaggtagagataact

SEQ ID NO: 15531 - DNA, 201 bp, Homo sapiens
acttgttgtaacaaaaattatatcctttaagggaagaaatggaaatcatgctttatgcaagtaagtaaatgcgttcagttcaaatacttttttgaggctcrcttgtatacttagtcctgtgctagagataaaagcaaacaaaacatggaaaacagtgaaagacagcattcttatcccaaggagctatgaggaaaagggaag

SEQ ID NO: 15532 - DNA, 201 bp, Homo sapiens
tgatttgcatttctctgagggccagtgatgatgagcattttttcatgtgtctgttggctgcataaatgtcttcttttgagaaatatctgttcatatccttygcccactttttgatggggttgtttgattttttcttgtaaatttgtttaagttctttgtagattctggatatgagccctttgtcagatgggtagattgcaa

SEQ ID NO: 15533 - DNA, 201 bp, Homo sapiens
ataaagacatacccaagactgagtaatttataaagaaaaagaaggttaatggactcacagttccacgtggctggggaggcctcacaatcacggtggaaggygaaaggcacatcttacatggcagcaggcaagacagactaagagccaagtgaaaagggaaaccccttataaaactatcagatcttgtgagacttattcact

SEQ ID NO: 15534 - DNA, 201 bp, Homo sapiens
gtttaaagtctgttttatcagagactaggattgcaacccctgcctttttttgttttccatttgcttggtagatcttcctccatccttttattttgagcctrtgtgtgtctctgcatgtgagatgggtttcctgaatacagcacactgatgggtcttgactctttatccaatttgccagtctgtgtcttttaattggagcat

SEQ ID NO: 15535 - DNA, 201 bp, Homo sapiens
tttttttttttttcccttaaataacatggccttgccaggttgtttagaagtgtcattatatttataactcactttcaattggttgagacacacatacacayacacacacacacacacacacacacacaccccttagttctcaatcatggtcctgttgacatttgggggtggataattctgtgttgttgtggaggggttctc

SEQ ID NO: 15536 - DNA, 201 bp, Homo sapiens
gcaaaataaccagctggcatcataatgacaggatcaaattcacacataacaatataaaccttaaatgtaaacaggctaaatgccccaattaaaagacacasattggcaaattggataaagagtcaagatccatcagtgtgctgtattcaggagacacatctaacatgcaaagacaaacacaggctcaaaataaagggatgg

SEQ ID NO: 15537 - DNA, 201 bp, Homo sapiens
acctttcaggctcgattcaagcccacgcttccttagagtcctattagtctctttttctctaggaatcccaccctcctttcagtccacgcctcgtatttttrcacacagggaaaatacacatgagcgtatcatcgtttcctgtgtatgttttgtcaccaaagctatctgggaaaatattacgtattaatgtcattaattgca

SEQ ID NO: 15538 - DNA, 201 bp, Homo sapiens
agtcctattagtctctttttctctaggaatcccaccctcctttcagtccacgcctcgtatttttgcacacagggaaaatacacatgagcgtatcatcgttycctgtgtatgttttgtcaccaaagctatctgggaaaatattacgtattaatgtcattaattgcaattgataaaaaagcacatctacattcaaaaaaattt

SEQ ID NO: 15539 - DNA, 201 bp, Homo sapiens
tattaatgtcattaattgcaattgataaaaaagcacatctacattcaaaaaaatttttaaatcattgttgtgagttttattagtcggtaatcttttactgyatgtatgaatgtactccactttctccccttggataaactggggtcttattttgcagtgctgtcaaactgtcactgttcaccagctataacaaagcacacc

SEQ ID NO: 15540 - DNA, 201 bp, Homo sapiens
cattaacagccaccaaattctcttcagccttcagcatactaaccctttcttcccatgaaaggcaggcagctctcacacatcctcttcaaggatagagtgcratgtaaaaataaatacatttaacaaagcaaaagaaaaagcatggacttgagtccaaactaggctttacaatataccaattatatggatgtaggcaaatca

SEQ ID NO: 15541 - DNA, 201 bp, Homo sapiens
ttcagccttcagcatactaaccctttcttcccatgaaaggcaggcagctctcacacatcctcttcaaggatagagtgcaatgtaaaaataaatacatttamcaaagcaaaagaaaaagcatggacttgagtccaaactaggctttacaatataccaattatatggatgtaggcaaatcaacctctataacattcttccttc

SEQ ID NO: 15542 - DNA, 201 bp, Homo sapiens
attcttccttcctaccacagccctgaggataattttgtgagtatttcactttgtactgcttatgttacaactgagaacagctgttatcctaaccacagggsgttatcatgccccacatcctgcaaatgtggtccccatgatattgggcatgaagtaattaaacaaaatctcctgaatcttctggtccctgggaggatagtt

SEQ ID NO: 15543 - DNA, 201 bp, Homo sapiens
tcataaagaataaaaattctatatttcatcaaatctgagatgtcatgaattataaatctcatcattgtcttatgggtcatttaagaacagttcttgccaayttaaataatacaatactttcttatttcttagtttagtgtctataaagtactctcgtaggcacagttagacaaatttgtttcaccaatgttagattcactc

SEQ ID NO: 15544 - DNA, 201 bp, Homo sapiens
ggttctcctgtgcactgaaccatgtttagcagcatctctggcctttacgcacgaaatgcagtagcactctctgagttgtaaccacctaaaatgtccccagrtattgccaaatgtccagggaagtggtgtaaaatcaccccaggttgagagctactgattcagataaagtataatcagacacacagatgtcaaaatgttaaa

SEQ ID NO: 15545 - DNA, 201 bp, Homo sapiens
cacctctgtgtaagtagatcctgacatgcttcaaagctgagatgcttcctgcttccctggggctgttctctacccgctccccactccttttccctttcccygccttcttccctctcccctccacccttcctctcccacctctctcctcccttcctctcccccctctctcctcccttcctctcccccctctctcctcccttc

SEQ ID NO: 15546 - DNA, 201 bp, Homo sapiens
agaagagtacagagttttttgctttgtgtttttgtggggtttttttcagagcatttccagaggtattgcctgaggtgcaaatttaatgaaaaaaataaaawtaaaacatttttcatttcagaagatcttagcatgtgctttaggatagttggagacaataaatatatttataaatgttatatttgaattctcttgatttaa

SEQ ID NO: 15547 - DNA, 201 bp, Homo sapiens
ctgtcatgtttcattgtactatctaagatctccataaagtctctcttttcttttaagtgcatttttgagactctttctataagcaaaaatgatagcttaaraagtttggctcttaaaatcatgacaccactgtctgcatttacctctcttaaaggcattaggccacatcagaaccttaaaacaccccatcttcttaaacag

SEQ ID NO: 15548 - DNA, 201 bp, Homo sapiens
ttcctggctaagggaaccatggcagagggtggagtcaaagatgacaatgacgttttcactctggatgacagggagaaggattgtactactaataaaaatasaggacgcataatggaacgagtggcagtgaaggagggagacaaattcagatttgaatatgaagtgacagcaggacaatcaggttgaatgtccttaaggaaa

SEQ ID NO: 15549 - DNA, 201 bp, Homo sapiens
agccagactgcctgggcttgattcccagcaatgtgaccttgggcaagggacctaacctgtctactcctcagacttcttacctgtaaaataaggatcataaytgtgcctacctcatggtgttattgtaaagattaaatgagtccatataggtgatgtgtgctgagcagtgcctggcttacagtgaatgttcattaaataggg

SEQ ID NO: 15550 - DNA, 201 bp, Homo sapiens
tagcagcaccattgttctttattagcaaacccattgccctcaatgaggtgcacctggcttgctttttcttaacactcaatctgccttcagagctggagctygtaagaggcacagcctcccattctgctacaaaaattctatagtctcctcagctactttctctatcatttctcattaaaatgatttattatacagaaatga

SEQ ID NO: 15551 - DNA, 201 bp, Homo sapiens
tcttcaatgttttcccactgtgcattgaatcctccagacacctccccacagctaacaagaccatccctttctggatcagcctgcctcctggcatccacccrtggcccatgctactctctccctcattctcgcgttgcagcggtatgacctttgacagttcctacaacctgtcaagcactgcctttactgctcccccataat

SEQ ID NO: 15552 - DNA, 201 bp, Homo sapiens
tctctctctgatgcctcggggcttccttctggcctttcagccctccactccaaattctccctgctgaaaccaggtgtgagttttgttccctgactacaccwagaactgataggcttatgggcctcagaaaccacctctgtgtaagtagatcctgacatgcttcaaagctgagatgcttcctgcttccctggggctgttctc

SEQ ID NO: 15553 - DNA, 201 bp, Homo sapiens
ccctcccccagacccttcttccaacacagtttcattgcacacttacaagacgtcaggcccacatcaagatgaaggtcacacggaaagcgaaggcctcacaytcaagcgtcagcccagactccagggcaccagccagctcccaggagtcaggggcgccctgtggtgagctctgccgctgtcgctgtcgtttcttaaagcgct

SEQ ID NO: 15554 - DNA, 201 bp, Homo sapiens
aggtccaaatgaaatgcctttctattctacacaacaagagatgggcacctctacttttttaactgcataaatagaagatttggattgtaaaaaaaaaaaaraaagaaagaaagaaagaaaaaagaaaatactgtatacgaaatgaggaaatgtgagaacttcacattctaaataaaataagtagaaaaaagcccacaacta

SEQ ID NO: 15555 - DNA, 201 bp, Homo sapiens
tctggctgggcgtggtgactcacacctataatcccagcactttgggaggccgaggcaggtagatcacctgaggtcaggagttcaagaccagcctgaccaaygtggccaaacccccactctactaaaaatataaaaactagacaggcatggtggtgcatgcctgtagtcccagctacttgggagcctgaggcaggagaatcg

SEQ ID NO: 15556 - DNA, 201 bp, Homo sapiens
tttgggaggccgaggcaggtagatcacctgaggtcaggagttcaagaccagcctgaccaatgtggccaaacccccactctactaaaaatataaaaactagmcaggcatggtggtgcatgcctgtagtcccagctacttgggagcctgaggcaggagaatcgcttcaacctgggaggtggaggttgcagtgagctaaaatca

SEQ ID NO: 15557 - DNA, 201 bp, Homo sapiens
gccgaggcaggtagatcacctgaggtcaggagttcaagaccagcctgaccaatgtggccaaacccccactctactaaaaatataaaaactagacaggcatkgtggtgcatgcctgtagtcccagctacttgggagcctgaggcaggagaatcgcttcaacctgggaggtggaggttgcagtgagctaaaatcatgccactg

SEQ ID NO: 15558 - DNA, 201 bp, Homo sapiens
cctggtgtggtggtgcgcacctatagtcccagctactcaggaggctgaggcaggggaatcacttgaacccgggaggtggagatttcagtgagctgagatcrcgccactgcactccagcctggcgacagagtgagactccatcttaaaaaaaaaaaaaaaaaaaaaaaaaaaagcaatgaagagcccaaaggctgtgtcctt

SEQ ID NO: 15559 - DNA, 201 bp, Homo sapiens
ctggtgtggtggtgcgcacctatagtcccagctactcaggaggctgaggcaggggaatcacttgaacccgggaggtggagatttcagtgagctgagatcaygccactgcactccagcctggcgacagagtgagactccatcttaaaaaaaaaaaaaaaaaaaaaaaaaaaagcaatgaagagcccaaaggctgtgtcctta

SEQ ID NO: 15560 - DNA, 201 bp, Homo sapiens
gaaggacagaaagagggagaccagctgagaagctattgcagtaatccaggtaagagatgatgagggtttcacctaagtagtgggaatggaggtgataagargtggtcagaatctgtacatattttgaaagcagagccaacaggatttcctaaaaacgtggatgaggatatggaagaaagagaagagtcaaccaagcaacaa

SEQ ID NO: 15561 - DNA, 201 bp, Homo sapiens
cattgctaaccataactagtaactgtaaataagggaaatgctcaaatttttgaattattgggttttttctttctttctttctttcttttttttttttttgkttatttgtttgaacagagtctcactctgtcacccaagctggggtgtggtggcacaatcatggctcactgcagccttgacctcttgggctcaagcaatcct

SEQ ID NO: 15562 - DNA, 201 bp, Homo sapiens
tatcagagactaggattgcaacccctgcctttttttgttttccatttgcttggtagatcttcctccatccttttattttgagcctatgtgtgtctctgcaygtgagatgggtttcctgaatacagcacactgatgggtcttgactctttatccaatttgccagtctgtgtcttttaattggagcatttagtccatttacat

SEQ ID NO: 15563 - DNA, 201 bp, Homo sapiens
tgaatacagcacactgatgggtcttgactctttatccaatttgccagtctgtgtcttttaattggagcatttagtccatttacatttaaagttaatattgktatgtgtgaatttgatcctgtcattacgatgttagctggttattttgctcgttagttgatgcagtttcttcctagtctccatggtctttacattttggca

SEQ ID NO: 15564 - DNA, 201 bp, Homo sapiens
tcttgactctttatccaatttgccagtctgtgtcttttaattggagcatttagtccatttacatttaaagttaatattgttatgtgtgaatttgatcctgycattacgatgttagctggttattttgctcgttagttgatgcagtttcttcctagtctccatggtctttacattttggcatgattttgcagcggctggtac

SEQ ID NO: 15565 - DNA, 201 bp, Homo sapiens
tgccagtctgtgtcttttaattggagcatttagtccatttacatttaaagttaatattgttatgtgtgaatttgatcctgtcattacgatgttagctggtkattttgctcgttagttgatgcagtttcttcctagtctccatggtctttacattttggcatgattttgcagcggctggtactggttgttcctctccacatt

SEQ ID NO: 15566 - DNA, 201 bp, Homo sapiens
agaacttcgttaagcatacacaagtatcaacagtcaaattgatcaagtggaagaaaggatatcagaaattgaagatcaacttaatgaaaaaagcataaagmcaagattagagaaaaaaagaatgaaaacatatgaacaaagcctccaagaaatatgggactacatgaaaagaccaaacctacatttgtttgttgtacctga

SEQ ID NO: 15567 - DNA, 201 bp, Homo sapiens
acaattatatgaatgcattaaattattacatgtaccctgaaaatatgtacatctattatgtatccatttttaatgtaatttttttgagacaaggtgtctcygtcactcaggctacggtgcagtggtgccatcatagctcactctaaactgagctcaaaccatcctcctgcctctgcctcccaagtagctgggattacaggc

SEQ ID NO: 15568 - DNA, 201 bp, Homo sapiens
ctcttagtaggcaacacatggatcctatgctcttgctaccatctccatgtacttcatcctctcctttcaaatccagactcaccaagtaaataactactttkttttttttttgtttgtttttttttttgtttttttttttgtttttttttttttttttgagacggagtcttactcttttgcccaggccggactgcagtggtg

SEQ ID NO: 15569 - DNA, 201 bp, Homo sapiens
caacacatggatcctatgctcttgctaccatctccatgtacttcatcctctcctttcaaatccagactcaccaagtaaataactactttgttttttttttktttgtttttttttttgtttttttttttgtttttttttttttttttgagacggagtcttactcttttgcccaggccggactgcagtggtgctatctctgct

SEQ ID NO: 15570 - DNA, 201 bp, Homo sapiens
acatggatcctatgctcttgctaccatctccatgtacttcatcctctcctttcaaatccagactcaccaagtaaataactactttgttttttttttgtttktttttttttttgtttttttttttgtttttttttttttttttgagacggagtcttactcttttgcccaggccggactgcagtggtgctatctctgctcact

SEQ ID NO: 15571 - DNA, 201 bp, Homo sapiens
atcctatgctcttgctaccatctccatgtacttcatcctctcctttcaaatccagactcaccaagtaaataactactttgttttttttttgtttgtttttktttttgtttttttttttgtttttttttttttttttgagacggagtcttactcttttgcccaggccggactgcagtggtgctatctctgctcactgcaagc

SEQ ID NO: 15572 - DNA, 201 bp, Homo sapiens
tgctcttgctaccatctccatgtacttcatcctctcctttcaaatccagactcaccaagtaaataactactttgttttttttttgtttgtttttttttttktttttttttttgtttttttttttttttttgagacggagtcttactcttttgcccaggccggactgcagtggtgctatctctgctcactgcaagctccacc

SEQ ID NO: 15573 - DNA, 201 bp, Homo sapiens
tgctaccatctccatgtacttcatcctctcctttcaaatccagactcaccaagtaaataactactttgttttttttttgtttgtttttttttttgtttttktttttgtttttttttttttttttgagacggagtcttactcttttgcccaggccggactgcagtggtgctatctctgctcactgcaagctccacctcccgg

SEQ ID NO: 15574 - DNA, 201 bp, Homo sapiens
catctccatgtacttcatcctctcctttcaaatccagactcaccaagtaaataactactttgttttttttttgtttgtttttttttttgtttttttttttktttttttttttttttttgagacggagtcttactcttttgcccaggccggactgcagtggtgctatctctgctcactgcaagctccacctcccgggttcac

SEQ ID NO: 15575 - DNA, 201 bp, Homo sapiens
catgtacttcatcctctcctttcaaatccagactcaccaagtaaataactactttgttttttttttgtttgtttttttttttgtttttttttttgtttttktttttttttttgagacggagtcttactcttttgcccaggccggactgcagtggtgctatctctgctcactgcaagctccacctcccgggttcacgccatt

SEQ ID NO: 15576 - DNA, 201 bp, Homo sapiens
atacctccataatcttcagagacatatttgtgtattttttaagtatgcccttaaacctaactgaatatttagttgatcaaattctaagtggtgtaattaaraaacatctggaactccatttggagtgcccatgtagcaatgcatgtcaggctgttgcctgccctataatctgtccatctcctccattctgctcctgctttt

SEQ ID NO: 15577 - DNA, 201 bp, Homo sapiens
ttgttctgggatggatggaatttcccgtaacccttttgagacaaggttaagactgaatcagccttgcatgggggtggatgggtgggagggtgggtgaaggragagacattgactttatgctcaagtttagtggctgaaccaagagatgttggcattacagctcatccaacgccatcaagttagagtgctcgtgtctcctct

SEQ ID NO: 15578 - DNA, 201 bp, Homo sapiens
gttctgggatggatggaatttcccgtaacccttttgagacaaggttaagactgaatcagccttgcatgggggtggatgggtgggagggtgggtgaaggaaragacattgactttatgctcaagtttagtggctgaaccaagagatgttggcattacagctcatccaacgccatcaagttagagtgctcgtgtctcctctca

SEQ ID NO: 15579 - DNA, 201 bp, Homo sapiens
cgttagttgatgcagtttcttcctagtctccatggtctttacattttggcatgattttgcagcggctggtactggttgttcctctccacatttagcgcttmcttcaggagctcttttagggcaggcctggtggtgaccaaacctctcagcatttgcttgtctgtaaaggattttattcctccttcacttatgaagcttagt

SEQ ID NO: 15580 - DNA, 201 bp, Homo sapiens
gatttaaaaactcactcaaaacacacacaactacatggaaactaaataacctgctcctgaatgactactgggtaaataactaaattaaggcagaaataagsttctttgaaaccagaacaacataccagaatctctgggacaccgctaaagcagtgtttacagggaaatttataacactaaatgcccacaggagaaagtggg

SEQ ID NO: 15581 - DNA, 201 bp, Homo sapiens
gtttcaaagtattttcccataccttatttgatatttacaataattctgtgaggctttaaggaagttattaatccctctgattcttattgtcccatctgatwgatgaggaaagtaagcaaatggcccaagaccagagtcaataagctgaataagcattaaaactgggattagaaattgagtcctgttttaccatgccccccc

SEQ ID NO: 15582 - DNA, 201 bp, Homo sapiens
aagaaacatatatatcgtaggtataatacttttatgaatttcggctctagtcagactttctaaaagtctcatgacctcacctggattaaaccaaaaaaatwaaaaaaaagttctgattagagaaaaacctgctttctgaaaaaacaagcaattaaaactacaaagtggaattgatagtatttagctattaagtctggaaca

SEQ ID NO: 15583 - DNA, 201 bp, Homo sapiens
cctcaattatacccccacaaaaaaactcaaaatgaatcatgcacctaaatgtaaaaacctaaagctataaaatttctaaaaggaaacttaggagaaaatcyttgcaatcctgattggacaaagatgtattccatattacatcagaatcccaacctaccaaagaaaaagtaagacttcatcaaagttaagagtttctgctct

SEQ ID NO: 15584 - DNA, 201 bp, Homo sapiens
acgacctgtaagaggcctttgaagaaacttgttcctgggaggaatttccagactggctgtccttacttctatctttggaaaatgtcgaagttaaaagttcrccctggcccacaaaaagccatcattacagaaatactgatttaaagagactggcttggagaggctctcaagttaaaaatggtgtgcaagggacaatttatc

SEQ ID NO: 15585 - DNA, 201 bp, Homo sapiens
tacggtttctggtccctgactgcattgacaagtaaaacctccctgcaattccttgagtttccataaggtggcattgggagtcctttagcacagaagtggaygacctgtaagaggcctttgaagaaacttgttcctgggaggaatttccagactggctgtccttacttctatctttggaaaatgtcgaagttaaaagttcac

SEQ ID NO: 15586 - DNA, 201 bp, Homo sapiens
cagcctggagagctgccatcagggacatggctccgtggaccacatggctggctctctgcatgtgtcaggagctgaaagagaagactgtcatgagccaatcrgtgtttttttattttatattagagaaaattcaattctgaaaatagtaaactttaaaagtaaataacaatttatgcttaaaaagtaataatctagtccatt

SEQ ID NO: 15587 - DNA, 201 bp, Homo sapiens
agggaagtctgcaagtagagcaggtggcaggggtgacaagtattggaattcagttctggacatacatgtgacatttctagagtctattagacatcaagtaragacgtgtcatggctttggttataagagcgaggagtttgtagaagggtcctgcactggaaatatgaatctgggaatcataagcatatagatggtacttaa

SEQ ID NO: 15588 - DNA, 201 bp, Homo sapiens
tggatggagatggtgcagatgcctttgacattagcacagatcccaatttccaagttggtatcataactgtgaagaaggtaatccaactcctttttctaaamcactttcatgggtgctttgaatgtttatgaaatgctagtaaggactgttgtattattgatatgcattgcttcaaatcatctgataaaagtgctttcctat

SEQ ID NO: 15589 - DNA, 201 bp, Homo sapiens
aaaaagaaaaactaaactaaaaggaggaagagtctagccagactagccagactgtcagatgaatagttgcattttgaatcagccagaccaagctaaccttyccttgtatctatgtaaacacaggagatctcaaatatttacatgcaaatggaatacacaaagtccccatgagcattcatgatggaaaaagcaggatactag

SEQ ID NO: 15590 - DNA, 201 bp, Homo sapiens
gagtatgtttgtattcagcaattttcagtaattacttatgtgcacataaaatttagggctctcttccctcctcccaagggtagaaattgagacgccactcmccaactttgtctacacctccctgacgctgagtacttggcacagaactggccacacacaaagagtgcagaagggtagctcacgttttattggactaccaca

SEQ ID NO: 15591 - DNA, 201 bp, Homo sapiens
gtatctgatacaagggtcgagtcagaggtgtttattccctgataatttataactgctgctatgacagacccaactctcctttttaaggactctccagggartgtattaaccagagaagactgctcttagctttaggattaagagagcaaactagcactgccctgacaggtaagagcagcactatgcatagacagtgagcag

SEQ ID NO: 15592 - DNA, 201 bp, Homo sapiens
ttttgatgagggaggaaagaccaggtgggatgtggcccccaaaaggcaggtcctgattgggaagctctcacagggaggacatcagagagaactgaatgggygaggagcaatgcggcagaaaagacaaacaggagtttggtgttttgtttgcttatttatttctgtcttacccgagagctttgactacagaatttacctttg

SEQ ID NO: 15593 - DNA, 201 bp, Homo sapiens
tttgatgagggaggaaagaccaggtgggatgtggcccccaaaaggcaggtcctgattgggaagctctcacagggaggacatcagagagaactgaatgggcraggagcaatgcggcagaaaagacaaacaggagtttggtgttttgtttgcttatttatttctgtcttacccgagagctttgactacagaatttacctttgg

SEQ ID NO: 15594 - DNA, 201 bp, Homo sapiens
atatattctattctatttcattttctttctatgctaatcataacccaccaaattgatttcacaatccactaagctacatctgaaaaacaatgcactatagyaaagaaaatgtttattccctccaaaattgctgcttctccgtctctacaacgttaagatatggattacagttgctggcaactttaaatcaaattttgaacc

SEQ ID NO: 15595 - DNA, 201 bp, Homo sapiens
tttatgattcagtcgatttggggcagtttgtatttctaacatgttcccaggagatgctgatgctgctggtccaggaaccacattttgaaaacctctgataygtagttactcactctctaacacatgaagattaaactatgtcccatctgtactgggtcccatcttcccgcagagtggtgttgtgaattgttttctcagtaa

SEQ ID NO: 15596 - DNA, 201 bp, Homo sapiens
ctttaagatttgacttgcatttgtcaacaaaatactatattttatagacaactaaataaattaattctgacttcctgggtttttttttttcatgtctcatrtatgtatctagtgcctagaaaatctcataagctctacgcaccgtgcctatagtacacgaagaataaaccatccctagaactaattctcttctgtcagaga

SEQ ID NO: 15597 - DNA, 201 bp, Homo sapiens
tgtatctagtgcctagaaaatctcataagctctacgcaccgtgcctatagtacacgaagaataaaccatccctagaactaattctcttctgtcagagaagsctttcagctgaataagaccattttcctcaaaatctgattttcagggcatcatgtaatatttgttatgtaatatttgttatttacctaattagattacctt

SEQ ID NO: 15598 - DNA, 201 bp, Homo sapiens
agcaaaaggaaacccagaaggaagagggcagaatctttaattacctttttttcttttctttttgatttttctgacactgtgtgcgaaggcttggagtccarggtgttctgacaagggtggcttttctctgccattcgctaaggcctttgtcacttttccaccacagaaaggctctggccttggatacagagatgccaattg

SEQ ID NO: 15599 - DNA, 201 bp, Homo sapiens
acagtttgtgaaatgccacatggatggactttgtattgctttggtgattctgtgggttccatcttcattacttcatgaagggctcatattactcacactayagactataaattcttgaacacccttgaactacttggctttttacatttgacactagacaggtgtctctgatggaggcagaagggacagtagaaccagcta

SEQ ID NO: 15600 - DNA, 201 bp, Homo sapiens
attataaggactggaaccactaaactacaccttttctccttttctagtttcagattagcatttgagaactcatttgaatacaattctttttaaacaaatayatacaggactcgatactcaggatgtcccaaaattcttggggtaattccaagcattacgtagcataaaccatatttaaatagcttacaacttccccaagac

SEQ ID NO: 15601 - DNA, 201 bp, Homo sapiens
ggctaatttggtagccatgtagaggaggggttggcaagggcagagactaggagcaggggagtcggttaggaggcatttagagtggtccagacttgaactgstaaggacttaaggaaatagcaggatgagtggaatgggacaaatgaggaaacatggacttctgcctcttgatttcctggctaagggaaccatggcagaggg

SEQ ID NO: 15602 - DNA, 201 bp, Homo sapiens
caatgatcagatctggggataattctccctctgcattttggttacaaagaaagagaggaattcttattgctaggtatgaggtccctgactctttgtactayccaatagcaacaaagaatggtccctggacccaagaagaacactgggggtcctagactctcagagggaaaagcacttaaaactcaatgaactccctggctc

SEQ ID NO: 15603 - DNA, 201 bp, Homo sapiens
aggtgttatagaaagtggaagtttctagaacttgttgtaacaaaaattatatcctttaagggaagaaatggaaatcatgctttatgcaagtaagtaaatgygttcagttcaaatacttttttgaggctcgcttgtatacttagtcctgtgctagagataaaagcaaacaaaacatggaaaacagtgaaagacagcattctt

SEQ ID NO: 15604 - DNA, 201 bp, Homo sapiens
ataataaaggacactgttaagagaatgaaaagacaaatcacagactaggagaaaatatttgcaaatcatacatctgacaatggacttgaatataaaatatrcaaagacctcctcaagaagacatagaaagatgcatcacgaggcagtaaggaagtgccaatcagaactacaatgagataccacttaacgcacactaggata

SEQ ID NO: 15605 - DNA, 201 bp, Homo sapiens
atgtggggtgactagagctttcatatactcctggtgggaatacaaactggtactgcctttctgaaaattcatttggaagtttcttataaagttaaaaatakatttactatacaatcccacaactccagtcctaggtatttaccccactgaaatgaaattttatgctcacacaaaaacctctatgtaaatattaataggttt

SEQ ID NO: 15606 - DNA, 201 bp, Homo sapiens; identical to SEQ ID NO: 2125

SEQ ID NO: 15607 - DNA, 201 bp, Homo sapiens; identical to SEQ ID NO: 2125

SEQ ID NO: 15608 - DNA, 201 bp, Homo sapiens
agatatcatcccacctgagtccatgacactcagtctcttccctgtacattaaaaaataagaaaaccaaaaatgtctttaaatgctttttggcactctattsgcacgtctttattaaacagattgaagctatttcatttggcaaatttctggtcagttcttccagtttcagtgtcctgggatgatggagtatgttgtgatga

SEQ ID NO: 15609 - DNA, 201 bp, Homo sapiens; identical to SEQ ID NO: 15608

SEQ ID NO: 15610 - DNA, 201 bp, Homo sapiens
atctctttgatcaatatgtgctcctttcaggtgttcctgggacctgccctattcagagtgtctagatatcatcccacctgagtccatgacactcagtctcytccctgtacattaaaaaataagaaaaccaaaaatgtctttaaatgctttttggcactctattcgcacgtctttattaaacagattgaagctatttcattt

SEQ ID NO: 15611 - DNA, 201 bp, Homo sapiens
atgtttttttctctcaaattaatgtatatctatctcatggcaggaaagagaagcagaatatgaggagagtgtggccaaagaagaccaaccagcagtaagtraattttggggaccttgagattatgccccatatatagttatcttattgaaattgactataatgtccagaatttctaatagaattaaaattgaggctagaag

SEQ ID NO: 15612 - DNA, 201 bp, Homo sapiens
tttcttcataggttccacttcccagcaaccccatcctaatggcttatggcagtatctcagtgagtaaaatgtctaacggttttcctttgtttattaaaagrttacttacaaggacaagaaaggaagtagaggcattatgatttggggatggattattgggaatactttgtcttcaaaagtctcttttgaatcttggcattc

SEQ ID NO: 15613 - DNA, 201 bp, Homo sapiens; identical to SEQ ID NO: 15612

SEQ ID NO: 15614 - DNA, 201 bp, Homo sapiens
ttgcttggtacttaagaaatacttttaagaatatttacattacccactaagtagtggtcaatgaatgaggtattctttattttttttttctcctccagggkcatcaccaggaaatatggtgtttggctgtaagccccagtggagactatgttgtatcatcgtcccatgacaaatctctgagactttgggagagaacaaggg

SEQ ID NO: 15615 - DNA, 201 bp, Homo sapiens
gttagtgaaagatgaaaatagtacccaaaagaggtgagtagacattttttgtgtccattttttggagtgaaaatggggagctatggaatggccttttgacrtcttatatcatttgttgtgctctaaagagttaggatttgtctgaatttgtatactcatttattttttcttgatgttttttgtggtgctagactttctgtg

SEQ ID NO: 15616 - DNA, 201 bp, Homo sapiens
ataatagtataactagaacttttcattagttattatttctgcctatgttagtcgatggtaggaattttcacataaggtttgtggcagcagacccaaaagakcagtgaaaggggctagggagaaccacgtttttcttaatttttatcccatgacgttaaataaaaatactttcttagacttttaaaatgtatcttcatagca

SEQ ID NO: 15617 - DNA, 201 bp, Homo sapiens
tttacggaaaggttgtttcctgtgttataaatctatgagggacagacacttgagatccagtgttctatgtactttacactaacactgccatgtaatgagastaattttcttgataacggaaaacagcttcaaaactattttaagtagggacattgcaggactaaatttatatccttctgaggtgaatactttaaacaaatc

SEQ ID NO: 15618 - DNA, 201 bp, Homo sapiens
aaacaacaacaacaacaacaacatgcctcctggaacatactatttcagcttttattttctcatttttataaaacagattgaagacccggaagaaccagacsccaagaaaatcaaaggatcttctcctggaatacaagatactcttgaggcagaggatggtgcctttgagacggatgaagcccctgaggatgtaattcattt

SEQ ID NO: 15619 - DNA, 201 bp, Homo sapiens
aaagagagtcatctagcttacagatgaatatttaactctaggcaagatgtatccaagtataaaatcagtagaaaaaataataaagggaaggatttaaaaaytgaccatgttaacaacgttaacaaatgtggcatttttatatttattttttctttttcagtgagctggaagaatctctacttgtgctgcctttctcttatg

SEQ ID NO: 15620 - DNA, 201 bp, Homo sapiens; identical to SEQ ID NO: 15619

SEQ ID NO: 15621 - DNA, 201 bp, Homo sapiens
cgatatgccttttctttgcctttaaattgctagacattttactacggtgtaacagacttttggaatgtcatattatgctacctggaatctcttgaaaatcrtattactcaaatctttttatattctataggtatgggggttggttctgttgtcagaagaaaagcgactcatcactggggcctcagacagtgaactgagggt

SEQ ID NO: 15622 - DNA, 201 bp, Homo sapiens
atggaatgtgggatccatttcctaagcaatggatcacatttttgcagcttggttatgaagtcttttctaaattgtgcagtcatgaatcatggaggttgtasgtatgttcattggagctgtgctcattttgtgtcttcccagacagggaagctgcagctttatgacttggcttcagggaatctgctggagacaatagatgca

SEQ ID NO: 15623 - DNA, 201 bp, Homo sapiens
actgaggtaagtgtagggtcatgggcccagggaaataatgggaaggcaaaagggaaaaggtggtggtcttctcttcccctttcatggctctttgtttttastgcacacagtaattatcatatgccatcttgagggacagtgaggctggtatgatggaagcaatgccagccattggagcagatactgctgctctgacatgta

SEQ ID NO: 15624 - DNA, 201 bp, Homo sapiens
acctggaatctcttgaaaatcgtattactcaaatctttttatattctataggtatgggggttggttctgttgtcagaagaaaagcgactcatcactggggyctcagacagtgaactgagggtatgggacatagcttatctgcaagaggtaattacttcttaaaatcatgggcaatatgtttagaagtttcataagcacctt

SEQ ID NO: 15625 - DNA, 201 bp, Homo sapiens
gctgtgctcattttgtgtcttcccagacagggaagctgcagctttatgacttggcttcagggaatctgctggagacaatagatgcacatgatggagctttrtggtccatgtccctctctccagatcaggtaactaaaccagattttaaagccctggagttcagccctgtggctaccctgatttctctcagggtttctttaa

SEQ ID NO: 15626 - DNA, 201 bp, Homo sapiens
agcctttgcaaatgagttgaatgtgtcataaggtttaggacagtattttttaagttgtcatcaaattgaactgaatagtagagaaagaaacttctttggcttttttttttttttttgctcgaaacatttctataatgtatattttgttgttgctttgatattgtgtctgtttactgtttctagaagggttaagtagggcta

SEQ ID NO: 15627 - DNA, 201 bp, Homo sapiens; identical to SEQ ID NO: 15626

SEQ ID NO: 15628 - DNA, 201 bp, Homo sapiens
agaaattctgtagtaccataaagaaaagccttttgagattgcagtgagctgagattgtgccactgcactccagtctgggcaacagagccagactccattgaaaaaaaaaaaaaaggctcttgaatgatgtattgggagtaaaacatttaggcttatttttaaaaatgtatatatccatccacttagagaaaatatgcttaa

SEQ ID NO: 15629 - DNA, 201 bp, Homo sapiens
gaagaatctctacttgtgctgcctttctcttatgtcccagacattcttaaactctttaacgaattcattcagctgggctctgatgttgaacttatatgccrgtgcctcttcttcctccttaggtaacatccttttccaaagaataccatgtctgttcagcagaactgcttcagtagtaccttaactgaagctgtcaacact

SEQ ID NO: 15630 - DNA, 201 bp, Homo sapiens; identical to SEQ ID NO: 15629

SEQ ID NO: 15631 - DNA, 201 bp, Homo sapiens
caccaagcttattaaaataatagtttgtggccacaatttcttcccttctcatttatccaatacacagcaatcttgtttcaaaactcctatgctgctacagytgtccacagtctcatcatacgcattctttgctattgcaattttcttgaatatggaagattagctgaacatgcattaagctcaggaaactctaaagaaaat

SEQ ID NO: 15632 - DNA, 201 bp, Homo sapiens
gcgggacgaggaaggaaactagccagcctgacaggaaggtttattcgagaaatacgggggttagataggatgagtttttggaaactggcaaacgatttagycttttcaaggctttaggatagggaaagctcatttgaaaagattagtcggtagtattatgacgtttaaatgaaaagagtgaaaaacatggaggcggaggtg

SEQ ID NO: 15633 - DNA, 201 bp, Homo sapiens
caccgggcccggcctaaacaaatattttcattcattcaggccaggtggcttataggtttctgactataagaagaggggaagaaacctggggtctaataccwcaaatttgaatgcttgacaatcaaattcccatttattacttactgtacctaatgtggagaaactttacgagacatgaagactccaagtgtggaggaataa

SEQ ID NO: 15634 - DNA, 201 bp, Homo sapiens
atttaactcaaaatggaaccaggcagagaagataaagaaaatcccagaattagacaccttagagcaggaatattgaaataaatgtgcaaaaggaggcaaamcttccactgaatctctgagagaattcgcatgtcttgacaataattatttagcattgatgtcacttacctagtttacgtaactgaaaaatagcttttttag

SEQ ID NO: 15635 - DNA, 201 bp, Homo sapiens
ccatttcttctaagtagtatcgtagagctatccaaagctatattatttttaaaatcatttttctaatttgtcattcttttttcttgatatcagtttttctrtgtttcttagccttttgaaactcattatagaatgagctttgtctaccttctagatctctagaaagccaggaatcagaatatggagcagagggaagatatg

SEQ ID NO: 15636 - DNA, 201 bp, Homo sapiens
tggcggaagaggcttccggaacggacccggaaggggcaggtcttgtgggcgggtccaatcggctgggagcctcgtggaggctgaggtgagtcctggaggtscgtggttggggcggagagcattatctgcggctccgattttgcagattctggctgaggcgttcgtgatgtcagcagcagccgagacgggcgtgttaaaggc

SEQ ID NO: 15637 - DNA, 201 bp, Homo sapiens
cggaagaggcttccggaacggacccggaaggggcaggtcttgtgggcgggtccaatcggctgggagcctcgtggaggctgaggtgagtcctggaggtgcgyggttggggcggagagcattatctgcggctccgattttgcagattctggctgaggcgttcgtgatgtcagcagcagccgagacgggcgtgttaaaggccgg

SEQ ID NO: 15638 - DNA, 201 bp, Homo sapiens
gccggcaggatcttcttttgtacagctatgttagctttaattttgcacagctctagacatcagaactcatttctaaacacttctatgcagctcaagaataraagtagcagaaatgcaagagagaaaagctaattcccacttggtgaaagagcacttaagtctcagtgagcaaacaaggaggagtcagccttggtcacttcc

SEQ ID NO: 15639 - DNA, 201 bp, Homo sapiens
ggaagaggcttccggaacggacccggaaggggcaggtcttgtgggcgggtccaatcggctgggagcctcgtggaggctgaggtgagtcctggaggtgcgtrgttggggcggagagcattatctgcggctccgattttgcagattctggctgaggcgttcgtgatgtcagcagcagccgagacgggcgtgttaaaggccggt

SEQ ID NO: 15640 - DNA, 201 bp, Homo sapiens
tttccttttgattttatttatgagtttgaactactgaaggctatcattttcataatgaaccacaatatctacatatatattccttacaagaaacaacactkgtcttaggataaagatgaaacttcactacaggaatgtaaaagaaaattgattaatgtggaggttacaatacatttcaagataggaagattctgtgtttta

SEQ ID NO: 15641 - DNA, 201 bp, Homo sapiens; identical to SEQ ID NO: 15640

SEQ ID NO: 15642 - DNA, 201 bp, Homo sapiens
tcccaaccaaatttaacactttaaatctgaattttctttgacatctcaatagcatccgtcaattgtgtccgtcttttccttgaaattcttcctaaggcttytgaagtatttcaccattttctaattgctgcttttgtctccactggctcttcttcctcctgctccctaaaccgactccagatttctgttccttgcccatac

SEQ ID NO: 15643 - DNA, 201 bp, Homo sapiens
attcaagccaaggatttaagatctttcataacttgactccaacctactttcccactatattcctaatactcaagcttttggcaagttgaactccctgccartcatcccaaacacctggagctttcctgttgccatggttttgttcattatttttacttaaagttcccgtcaatcaagttttcacattctataagatccagc

SEQ ID NO: 15644 - DNA, 201 bp, Homo sapiens
ctctaaagaaaatcagataatgtagacaaaagtctaatttctaggctggctgcagataccttgttcaagaagcgccggcaggatcttcttttgtacagctmtgttagctttaattttgcacagctctagacatcagaactcatttctaaacacttctatgcagctcaagaataaaagtagcagaaatgcaagagagaaaag

SEQ ID NO: 15645 - DNA, 201 bp, Homo sapiens
aatattttcaatataaaaagaaaggattagtatcattcatctattaataacttacagtcaaataagagatgacactctaagaatgatagacaaaagaaagwcatgaattggcaattcaaaagagatactttatggccaataatcaccataaagcatgtaaaatatttctcatttgtattcataaaaaatgtaaattaaaat

SEQ ID NO: 15646 - DNA, 201 bp, Homo sapiens
aaaatcaaataaatagagaactgtaacacaagcagcacacaattcatgccactggagaaagtacaaaatagaaataaaatgtgaagactttatttctgctrcaaattatataataccttttaagacagagtccaattatccatttttatatatgataaactattttatacagtaccttggaggtaataggttcttgatatc

SEQ ID NO: 15647 - DNA, 201 bp, Homo sapiens
ttaaaatatttaatattttcaatataaaaagaaaggattagtatcattcatctattaataacttacagtcaaataagagatgacactctaagaatgatagrcaaaagaaagtcatgaattggcaattcaaaagagatactttatggccaataatcaccataaagcatgtaaaatatttctcatttgtattcataaaaaatg

SEQ ID NO: 15648 - DNA, 201 bp, Homo sapiens
cctcatctctactaaaaatacaaaaaactagctgggcgtggtggcaggcgcttgtaatcccagctactcaggaggctgagacaggagaatcacttgaaccyggcaggcggagattgcagttagccaagacagtgccaccagcattccagcctgggcaacacagtgagactccatctccaaaataataatagtaaaaaaaaa

SEQ ID NO: 15649 - DNA, 201 bp, Homo sapiens
cagcacctagcttattgacaggtaagcagcacgtggtagctgttaaaatagttacttgaacagagatctattcagttgagttcagggactgttttttatayatctttgcatcctcagtgctttattcatatcaggcattcaggaaggtaatacctagaattaatgacaagaagattaaattctttgttgatttgcaacaat

SEQ ID NO: 15650 - DNA, 201 bp, Homo sapiens
ggtaaattagtgtcttgttcagataacacaggttctgtaagagaatgattctatagttctaatagaaaaaatatatattacagcttagggaatataaaggmaaagaaataacactgtaaggtggggttatatgggacggactttgtaaatcaggtttttgagcggtgtttttttccagtttgctcatgaaggaggattata

SEQ ID NO: 15651 - DNA, 201 bp, Homo sapiens
atttgggaagaaaagaataataaaacaggggttttagatattaaaatgtcatataaacccataatttaagaagtatcatattgatacttcaatgcaagtaycaatgcaaaatagattattgcaaccaaatggaaatctcagaaacacatccatgattacattcctaattagtatattttaaagacgacattttaataagta

SEQ ID NO: 15652 - DNA, 201 bp, Homo sapiens
aataatcaccataaagcatgtaaaatatttctcatttgtattcataaaaaatgtaaattaaaataaatattaagactgaacattttttacttatgatattygtagtagtttttgagaaaactaataatagagttaaatgaatggggaacaggccttgtcatacatatccctgctggttctatagatttacccaacctggag

SEQ ID NO: 15653 - DNA, 201 bp, Homo sapiens
ttgttaatcccaaagatttaaaactatggtttctgtctgaatttggtcattgcaaccaagttactgtgttgtggggccaccattttcttctaggctcagakatgcagtccttgtggcttgccgatttgtgtcccaaaccacaagtcttaatgttcttgagcataacacaatcactgaagtgagtaagggatgcagtggtgt

SEQ ID NO: 15654 - DNA, 201 bp, Homo sapiens
acagctcctcataaaagactgtaacttctttatttttgtgtgttttaagttgcatgggtgttttttggggatactttttactcttccatgtaaagaacagrtgggactgatttgttatctccttcattcacctcttgtcccttttataaataaccagtggattatggattttcagtgaatttaataaaagtgcagaaatta

SEQ ID NO: 15655 - DNA, 201 bp, Homo sapiens
agctggttataaaatattaggcatgtaaaaggaaggttagtctattttggcagaatctttttctaatatggataatgcccaagtgttgttaaagtagactwtgatactttgtgtgactgaattccctaagcctaccacttttgccaaaccaaatataggcattttgatattgtccattcattttgtgattcccaagaggtt

SEQ ID NO: 15656 - DNA, 201 bp, Homo sapiens
ggagtttttatatgtattacaacaacgtagggctttggagaaaataattaagccttttcttaaatgtttcattgcctagtacaaatactaatttctatatwaaaaaacttgaaatggattgtggagtttcatttttattcataagagtaatttggaattattggtgctcttaattttactgtgcctgagtattcctatgct

SEQ ID NO: 15657 - DNA, 201 bp, Homo sapiens
gagatcattttgatagtatgaatccaaaactttaaaaataaacatatcatataacccaagagcttttcattttagttttttctaatcagagatacatacaraaatttgtatataagaatgttcacttctgcatatttataacagcagaaggttggaaactaaatgtctgaaacagaaaaatttttaaataagttgtgctat

SEQ ID NO: 15658 - DNA, 201 bp, Homo sapiens
gagcctgactttgattctacagggaacattgagctagtgcaaatattaaaaattaaggttatctgacagttgcacattggatgggatgagagaacagcaayggacaaagagaccaaatgagaagctgttaaaataatccaggtagtaggacttaagttcaggttagtgtacagaaatggactagaggagttaatacttaga

SEQ ID NO: 15659 - DNA, 201 bp, Homo sapiens
tttgcttttcaaaagtaagatcagagagaatcggagctttagacattattgaagcatatgttccttttaaagcaacagtgagttttggatctccctattckttgaatgagttttcctaaacaggctatatatttttttcctgtttcttcttttagtgggaaagataccatggtgaaatggtgggaccttgatactcagcac

SEQ ID NO: 15660 - DNA, 201 bp, Homo sapiens
agcgactcatcactggggcctcagacagtgaactgagggtatgggacatagcttatctgcaagaggtaattacttcttaaaatcatgggcaatatgtttaraagtttcataagcaccttggatttagaatcagatgtaattattcagtacttcacatcatattagaaggaattctatcacaccaataacctgcaacactta

SEQ ID NO: 15661 - DNA, 201 bp, Homo sapiens
ttcttgttcagccttcagagcaatgctacaagtaggaaatggtatcctcattttacagatgagatagcaaacccagagagattaagttgtccaaggtaatrcaactactaagggaagaaaaataaatattgttgtttacttttaattgagaattaggtaaattacaaattacctctccttgactcacattaaccttttgcc

SEQ ID NO: 15662 - DNA, 201 bp, Homo sapiens
gtaagtgtctttgtatagagataaaataatgaggcaaattcctagtgtgatttagaaatagtatagtatgctgtgctttgtctttagcaatacccaccacygataaatccatatttgagatagtttttgttagaattagtaggaatagaaaaaacaaacaagaaaagttcttaatgagggaaagataagtaacaacacctg

SEQ ID NO: 15663 - DNA, 201 bp, Homo sapiens; identical to SEQ ID NO: 15662

SEQ ID NO: 15664 - DNA, 201 bp, Homo sapiens
taattttttatgagaacagaagttgattcaatatccttcttagagttgctcatcagaacataaatgtcactttctagtaacatttttgatggtttccaaaycaaaacaagttccaggagggcattcgagatgtatacatcatcaataattactcttatgttaaaagttgctgttttcccgtagctttgccaccatttataa

SEQ ID NO: 15665 - DNA, 201 bp, Homo sapiens
tatactaatcgaagagaaggagaacttttatgataaagtgacatgtacagaacctagccaagttacaatttttggtcaaaatacttgaaactctttaactytaaaagtttaaggtcaataggtgcattataaagtaaattttaagccaggcaaatttctagtcattaagtcagtattcattgccttagtcagccattggct

SEQ ID NO: 15666 - DNA, 201 bp, Homo sapiens
actaattttcttgataacggaaaacagcttcaaaactattttaagtagggacattgcaggactaaatttatatccttctgaggtgaatactttaaacaaayctagattatccattctatgtatatttttcaaactggtttactgagagtttttgtttcttcttgatgctagataatagtataactagaacttttcattagt

SEQ ID NO: 15667 - DNA, 201 bp, Homo sapiens
ttagtgtcagaagaaaagagaggggtaccagaagtaaggtaggcttggttatagacatgttaaatgtgaaactataaggtattcaagtggagatgttcagkaaatattggaaactctataattagtattcatgtaggtggaaaggactggaaatagacagatgggagtccctggacctaggcatgctatatgaattctcca

SEQ ID NO: 15668 - DNA, 201 bp, Homo sapiens
aggctgctagaattgggcttactcgaaaggaagtgggcctcagaagataatattagttaaaagaagtagaggagaacatggatgttattctaagtaaaacsaataatatgaagaatacaaggtcgcgggacgaggaaggaaactagccagcctgacaggaaggtttattcgagaaatacgggggttagataggatgagttt

SEQ ID NO: 15669 - DNA, 201 bp, Homo sapiens; identical to SEQ ID NO: 2138

SEQ ID NO: 15670 - DNA, 201 bp, Homo sapiens; identical to SEQ ID NO: 2138

SEQ ID NO: 15671 - DNA, 201 bp, Homo sapiens
gggattacaggcatgagccaccgcacccagcccattgttgattttcgtatcccatattcatccaatctattagcaaatcctatcagctctaccttcaaaastgatcccaaatccagcctcatcttaccacctgcactgccactaccccattcaaaccactgtcatctctcatctgggttattgtaaagccccctgactggt

SEQ ID NO: 15672 - DNA, 201 bp, Homo sapiens
taccagttgtagtctaaaccttgtagccattcttgattttcttttatttatttatttattttgagacagaggctcgctctgtcgcccaggctggagtgcaytgatgtgatctcgcctcactgcaacctccacctcctgggttcaagtggttttcctgtgtcagcctcccgagtagctgggattacaggcgtgtgccaccac

SEQ ID NO: 15673 - DNA, 201 bp, Homo sapiens
atgactttttcttgactcatgttaataattcattatatggtactgtgtggacctataatctctagctttattagcataacaacaaaaatattaataattaytattaggttggtggaaaagtaattgtggtttttgccatttaaaaagtaataattgcaattacttttgtaccagtattattattagcaaccatttattaaa

SEQ ID NO: 15674 - DNA, 201 bp, Homo sapiens
ggcttggttatagacatgttaaatgtgaaactataaggtattcaagtggagatgttcagtaaatattggaaactctataattagtattcatgtaggtggamaggactggaaatagacagatgggagtccctggacctaggcatgctatatgaattctccaaggaaaacactgtagaaggaggtggtagatggccaaagaca

SEQ ID NO: 15675 - DNA, 201 bp, Homo sapiens
actgcccaccctttcacttctcgtagagacggcgtccccgacaacgcctcgggaaagaacctaaccaacatgcgaggaagtggcgccaggctcgttcttcmagagaagtgacagaactaaccctcagcctgcaatcctgaccagggccgagtcccgagcgcctcggaccgcgcccccggccctctccgccccgccttccct

SEQ ID NO: 15676 - DNA, 201 bp, Homo sapiens
aatgtgtggcaggtctgttgccacggtccaggccttcagtgcatcttggaaacatcgttttgggggctgtaggttaggaagcggagatcatggggtctcgraagaaggtttggtcgtgaactgtcagaaaggaggcgaaagctgtgcacgtggaacaaagtgaacagtgcaagttgtatgggaggtagtttaaatatcgag

SEQ ID NO: 15677 - DNA, 201 bp, Homo sapiens
ttaaattggctttatgttggttcctgtgagagaagcaatgaggccagtaagtgattattaccagaaaatattatcagagagttgagattgaattttttttktgttagactaaaacagcatttgataattagaaagaccctgtagagttaagccaaccaaccaaagaaacaaaaaacaatagcaaaaagaaacagctcctca

SEQ ID NO: 15678 - DNA, 201 bp, Homo sapiens
actgtaacttctttatttttgtgtgttttaagttgcatgggtgttttttggggatactttttactcttccatgtaaagaacagatgggactgatttgttakctccttcattcacctcttgtcccttttataaataaccagtggattatggattttcagtgaatttaataaaagtgcagaaattatggcatctttccaaaaa

SEQ ID NO: 15679 - DNA, 201 bp, Homo sapiens
tatttatattaggttttactgcctattgagacaaccaggtgcataattgattgccctttggccataaaaatgcagtgtcatggatcttagagctaaaaagsactgtaaaaattacccagaacagcgtcctcagacttaaccttctgcaagttatgtctgtatataagaagattctaattgctaactgtttatacttttctg

SEQ ID NO: 15680 - DNA, 201 bp, Homo sapiens; identical to SEQ ID NO: 15679

SEQ ID NO: 15681 - DNA, 201 bp, Homo sapiens
gattctaattgctaactgtttatacttttctgaataaaatagttgtttctaattaaaaagtagccaagctaagatgcctggctgggcttctgaggaattartacactcgtgtgtgtgtgtgtgtgtgtgtgtgtgtgtgtgtgtgtatgtgtatgtgtatgtacacatacatatatatagttgacacttgaaaaatgcagg

SEQ ID NO: 15682 - DNA, 201 bp, Homo sapiens; identical to SEQ ID NO: 15681

SEQ ID NO: 15683 - DNA, 201 bp, Homo sapiens
ttacctagaatttccagcttacctctgacacaagggagaaaaaaggtaatactttccttcctattataggcattctagatgaccactgattcttatcaggmaagctctggaaattccaccctatgtaatcacaaagaaatgtgccagcctgggcaaccaagtgagaccttgtctctacaaaaaaattagccaggtgtggtg

SEQ ID NO: 15684 - DNA, 201 bp, Homo sapiens
aaaataaatgcagatgactgtatcaacaggcatgcatgaatgtgcatacaagagtctacgttttcacacagtaaaacttttaagaatattcaattcaggattttttttttttttttttgagacagtctcgcactgttgccctggctggagtgcaatggcgcgatctcggctcactgtaacctccagctcccaggttcaagc

SEQ ID NO: 15685 - DNA, 201 bp, Homo sapiens
gagctgttcagaaaacccttggcaccttaaatgaacatgcaatcttctcatacagataatccattcattctaagattttccaaatacaacctttggaagakgcattatcagaggccaagtttgaatcatgtaaagaaataactagttcaagccaaagtgcagctgtaaagcaacagattgaagatttatcagtagagagtc

SEQ ID NO: 15686 - DNA, 201 bp, Homo sapiens
ccaaatacaacctttggaagatgcattatcagaggccaagtttgaatcatgtaaagaaataactagttcaagccaaagtgcagctgtaaagcaacagattsaagatttatcagtagagagtcataaaacattttaacaactcaattttcaagaactcagaattaaaacaacatacaaaatcataaaccctgaatcaggaat

SEQ ID NO: 15687 - DNA, 201 bp, Homo sapiens
ctccctttcaggtgtattcagtgacagtaggtgaaggtttccctgatcacctgattccaactgcaaatcaaccttcttctccctacttctctctcttcctcccctttctccaccccttctctgcttaaactttccccatagtttcttctaccatctaacatgctatctatttaatttctttattatttatcataactgtct

SEQ ID NO: 15688 - DNA, 201 bp, Homo sapiens
ctttcaggtgtattcagtgacagtaggtgaaggtttccctgatcacctgattccaactgcaaatcaaccttcttctccctacttctctctcttcctcccctttctccaccccttctctgcttaaactttccccatagtttcttctaccatctaacatgctatctatttaatttctttattatttatcataactgtcttcct

SEQ ID NO: 15689 - DNA, 201 bp, Homo sapiens
gatccacccgcctcggcctcccaaagtgctgggattacaggcatgagctactgttcccagcctatcacacaatatttcggcaattctttgtctctgggccaaaaaaaaaaaaaaaaagaaagaaaagaaaacactccaagccaaccttggatttgcagggcattttgcattagtgcttggtccttacctatcataattcat

SEQ ID NO: 15690 - DNA, 201 bp, Homo sapiens
ggcctttctcatggatacttaaacaggaaatgccagcagcaaaaacaccaacccctgatgacctttccactaaaatgtgaaagaattgcaagatctgactrcatttttatgagcctagtaaggaacacagttctattcatgcagtaaagatgaactcatctattgctgaaatgcatgccatttgaccataaaaaaaaatgc

SEQ ID NO: 15691 - DNA, 201 bp, Homo sapiens
tgaggcaggagaatcacttgaacccgggaggtggaggttgcagtgagccgagattgtgctgctgcactccagcctgggtgatagagcgagactccctctcaaaaaaaaaaaaaaaagtgtgaagccttgagcagacgagacttctagtgcatcaagttactcatctactaactttaaaagataaaataagcaaaataaatg

SEQ ID NO: 15692 - DNA, 201 bp, Homo sapiens
caacgcccaactaatttttgtatttttagtagagacgaagtttcaccatggtggtcaaggctggtttcaaactcctgacctcaggtgatccgcccacgtcrgcctccaaaagtgctgggattataggtgtgagccactgcgcccagcacatttttacttttttgagaagtttaaccatttgtcttcaatatatgctggtac

SEQ ID NO: 15693 - DNA, 201 bp, Homo sapiens
caactaatttttgtatttttagtagagacgaagtttcaccatggtggtcaaggctggtttcaaactcctgacctcaggtgatccgcccacgtcggcctccmaaagtgctgggattataggtgtgagccactgcgcccagcacatttttacttttttgagaagtttaaccatttgtcttcaatatatgctggtactctatta

SEQ ID NO: 15694 - DNA, 201 bp, Homo sapiens
gagccggggagcagaaagtatatgtgtcaggtgtgaggaagaaaatagattttggaagttatgagagctgtagagagtgagttgagcatagtttgtgattwtgagggcctctaaaagtattagggcggcggcagccactgcacggagacatgatggctaggctaaaacagtaaggtcaagttgtttggacaaaaaggctac

SEQ ID NO: 15695 - DNA, 201 bp, Homo sapiens
gacttcctcccattgcaccacccagcagtcagttcagggtctgcttcaggttactgagcttgtgaataccacacaggatagcagagcaatgcaagtatgtrgcaaagcaaagtccaagtgcctaagagttttgaccctgaactgaactctcaacctttgtgccaatgaacatgagtcattttatatttcaagaggttaaag

SEQ ID NO: 15696 - DNA, 201 bp, Homo sapiens
actaacttttcatctcatattatttagctatagttagcaaacctaaattcaatgcttttattaaaacagaataggaattttcagtgtgttgtattgacaayctagaatcaactagaatagttattaaaaatgcagattctaggacagtcttcccagacattgaattagaatctctggcagtaggtctagggaatccatatt

SEQ ID NO: 15697 - DNA, 201 bp, Homo sapiens
gaatgagaactacataaaagagcataacaaacatatgggataagatgaaaaaggtctgtcatacgcataacaggcaacctgagagagaagggaaaatgcarcaaaatgggtacttagacagaatcagtatttgaagaaatactggccagtattttccaaaactgacaaaggtatcaagccacagattgaagaaactctagg

SEQ ID NO: 15698 - DNA, 201 bp, Homo sapiens
ctgcccataaaatgctatccaatccatcacagaatgtgtggggtttcagctccttctccccttaaacttcctagccacagaaccctggagaaactgcttarcctctccaagcctgtttctcacctataaaattaattcggccgggcatggtggttcatgcctgtaatgccagcactttgggaggccgaggcaggcggatca

SEQ ID NO: 15699 - DNA, 201 bp, Homo sapiens
tgcccataaaatgctatccaatccatcacagaatgtgtggggtttcagctccttctccccttaaacttcctagccacagaaccctggagaaactgcttagsctctccaagcctgtttctcacctataaaattaattcggccgggcatggtggttcatgcctgtaatgccagcactttgggaggccgaggcaggcggatcac

SEQ ID NO: 15700 - DNA, 201 bp, Homo sapiens
tactccagaggctgaggcgggagaatcacttgagcccaggagttggagcttagagtgagctatgattgcagcaccacactccagcttaggtgatgcagcargactccatctctaaaaaataaataaataaatttgaaatcatttcaaaataagttattaattaaaaatgttccaagagtataatgaatttctcttaaaata

SEQ ID NO: 15701 - DNA, 201 bp, Homo sapiens
cttagagtgagctatgattgcagcaccacactccagcttaggtgatgcagcaagactccatctctaaaaaataaataaataaatttgaaatcatttcaaartaagttattaattaaaaatgttccaagagtataatgaatttctcttaaaataacaggacatccacatatctatgggaatgaatttttttttccataagat

SEQ ID NO: 15702 - DNA, 201 bp, Homo sapiens
tgatagattctcatggtatgtctacccaaagaccaaacagcactcctgcagaccccctttgctctccttcaggattctattaatgaagcattttacagcayaaaaaagtcaaccataccagctgattcaaagtatcccaaggcctcctgagcaggcccgtggaacataagtcttcctgaggccaataaggtgaggctatca

SEQ ID NO: 15703 - DNA, 201 bp, Homo sapiens
ctgcttagacatcctaagttaaaagtgagacaatactaagtcattaaatatctgaaacttgtatttctcagtaaaatactctattcttgcctttagattgyttgctctagttcagcctgactttgtcttactaacttttcatctcatattatttagctatagttagcaaacctaaattcaatgcttttattaaaacagaat

SEQ ID NO: 15704 - DNA, 201 bp, Homo sapiens
tcttgcctttagattgtttgctctagttcagcctgactttgtcttactaacttttcatctcatattatttagctatagttagcaaacctaaattcaatgcytttattaaaacagaataggaattttcagtgtgttgtattgacaatctagaatcaactagaatagttattaaaaatgcagattctaggacagtcttcccag

SEQ ID NO: 15705 - DNA, 201 bp, Homo sapiens
tggaaggatcagtgataagctccattcctatactagtcctttttctttctcctccagacacaccacggataaactgagttccaacctaaatcacaaatatyataattgtcaatgataacaaccagtcattatcatttggtgagctcctaacgtgtgccagtcctgtaagagacactttatctcattaagttcatttattct

SEQ ID NO: 15706 - DNA, 201 bp, Homo sapiens
gcaaccatttttgaccatacacattacaggaaacttctgaatcagagtcattttatccacacagggaaagtcctacttatgctgatcatgatgctttcagwttttccacattaccttggagtctgccactttatccagacctaactcttgaatgaccctgttaatccgttcgtttttttcatgattcgtcatagttgttgc

SEQ ID NO: 15707 - DNA, 201 bp, Homo sapiens
gccactttatccagacctaactcttgaatgaccctgttaatccgttcgtttttttcatgattcgtcatagttgttgcaagccgaagagctgctgagaactktaagttttctctcaccgtcagagtgcccatcacaacatcatccttaaggcaaatagcattttaatgagacataatgataatgagtcttttctaagaccat

SEQ ID NO: 15708 - DNA, 201 bp, Homo sapiens
tcatgattcgtcatagttgttgcaagccgaagagctgctgagaactgtaagttttctctcaccgtcagagtgcccatcacaacatcatccttaaggcaaayagcattttaatgagacataatgataatgagtcttttctaagaccatgactgtttagtatacataacataatccacaaagataacataactaaggtaaagt

SEQ ID NO: 15709 - DNA, 201 bp, Homo sapiens
tcacataagtgtctatgagaaattaagaaaagctgctgtaaagaacgtcagttctaggaccatgtcacataatcaactggaagcacattgaactatcagcsaaagcacttacccatatagaaacagaggaaacagaaaatgcaaacccactaatacttacttgtaccacgtaacctgaattacatttgaaattggcaggtc

SEQ ID NO: 15710 - DNA, 201 bp, Homo sapiens
taatcaactggaagcacattgaactatcagccaaagcacttacccatatagaaacagaggaaacagaaaatgcaaacccactaatacttacttgtaccacrtaacctgaattacatttgaaattggcaggtcgcggtgctccatttatcagaacatctccagataatccacttggatctttccttgcagctaagacatcta

SEQ ID NO: 15711 - DNA, 201 bp, Homo sapiens
catgcgttgcaaatgctcaataaatacctgctcgcacacaaaaaaaagtggcttttaaaagcacattaaaagtgcacagaaaacgcttacttatactctcytatactcacgaagatttgcctccacctgtgggtcccaggatggcgttgagaccaggtttcatgatcccactgtaaacacaaaaacagactgatttactat

SEQ ID NO: 15712 - DNA, 201 bp, Homo sapiens
cgatagcagatgttatgaaaacttaacacagctccttcagtaaatgccttcaggtcattggaagctgtcgcggggaagccattggtgtttccttgtgacaytgggataaaaacttcgacattactggaagacatctggagagtttttatctttctgcagacagaaaagcaatagtaagttgatagtccagataaatgagat

SEQ ID NO: 15713 - DNA, 201 bp, Homo sapiens
cacttaacaagaccaccaagcatgtgcacggtgcgttcctaaatcctacccagttcctccacaggctgcctccttgccgcgtctctcaatctcagtgggartggcgggcactgcctcttccctcctgcgcgcccggaaccttttgagtgggcacagcacgcagcccgcgcgcggcacaaccccttcccccaaccacacccg

SEQ ID NO: 15714 - DNA, 201 bp, Homo sapiens
ctcccctcgcgcggcggccggcgtgggaggcgctgcggctggaggtcacgatgggagccggcgggtggccgcctggggagacccggacatccaggggacgrgctcaggcagcgctgacacgaacttcctaagccgcgcttcgggctgtggaccgccagagctgaacgcagtggcccctccccagcgccccgggtttcccca

SEQ ID NO: 15715 - DNA, 201 bp, Homo sapiens
gtgacacgcagggacaagccaaacactcccgcctccgggatcgaacggaatgaaccagagtgattaactacgagaatcaccaggcgctcattgggctgatsagtacctcgtctgacctagctgggtttggtcgccgtcactggccggagcgccgaagcaccggggacgctgacgcacaggttgcccagtcacaagcgctgc

SEQ ID NO: 15716 - DNA, 201 bp, Homo sapiens
ccaaaaattcattatgctgcaaagcctataacacaagtgggagcagggcaaggtaaacagttttaaattttaagaagtttccaaagagttatcacaatcaygccctctgagtttaatctttattgttatttctaaaaacatattcacagtctttgtctcaccaaaccaactaatgttattttccctggcaatcaagaaacc

SEQ ID NO: 15717 - DNA, 201 bp, Homo sapiens
tttcatgcagaattctagagaataccctcttcaagtccctaccactttgtaagtatttcttttaaaaccaactctttcttgaagttctctccacttactcwagacactcactaaactcttctcctctgcatgtgcacatctctatatagctgaagtcatttacggttttaaaggaagaacaaaatatctaatacatattag

SEQ ID NO: 15718 - DNA, 201 bp, Homo sapiens
tgaagttctctccacttactcaagacactcactaaactcttctcctctgcatgtgcacatctctatatagctgaagtcatttacggttttaaaggaagaasaaaatatctaatacatattagatattccatttaatcgtaagatcctcaattgtcaagactatgtactcaactttatttgtaactgcaaataatggaaggt

SEQ ID NO: 15719 - DNA, 201 bp, Homo sapiens
ttaaaggaagaacaaaatatctaatacatattagatattccatttaatcgtaagatcctcaattgtcaagactatgtactcaactttatttgtaactgcamataatggaaggtcaagaagcactgactattctaatgacacaaccactatgtgtgctcaccaatacacctggcattggaagaatctataccagataaatcc

SEQ ID NO: 15720 - DNA, 201 bp, Homo sapiens
aaaggaagaacaaaatatctaatacatattagatattccatttaatcgtaagatcctcaattgtcaagactatgtactcaactttatttgtaactgcaaayaatggaaggtcaagaagcactgactattctaatgacacaaccactatgtgtgctcaccaatacacctggcattggaagaatctataccagataaatcctg

SEQ ID NO: 15721 - DNA, 201 bp, Homo sapiens
tttcagagagtgcaaaatggacaggtgtttccttatctcatggtttggtttatagttttgagaaccaaaaatatgcttgcaaggtgcaactgacttcaccmataggcaagactaaagacatgtccttttttgttttgttacatacttacctaacatgaagtacactatacaggtaaatataatacttggtaacatcctcat

SEQ ID NO: 15722 - DNA, 201 bp, Homo sapiens
gcaaaatggacaggtgtttccttatctcatggtttggtttatagttttgagaaccaaaaatatgcttgcaaggtgcaactgacttcacccataggcaagaytaaagacatgtccttttttgttttgttacatacttacctaacatgaagtacactatacaggtaaatataatacttggtaacatcctcatgggtaataaat

SEQ ID NO: 15723 - DNA, 201 bp, Homo sapiens
ttcatcaatttaaaaataaattttaaaaagtactggtaatcctccggatcccatccttggccccaaccccagatgtaatcagtctaaccaatagcccctgytgctggacagccccgttcctagaacaaagacctactcacatgaagagcttcttctctaccacaaagagttccacggctgaaacactgctgaaacactggt

SEQ ID NO: 15724 - DNA, 201 bp, Homo sapiens
accacaaagagttccacggctgaaacactgctgaaacactggttggtcgtcaggaagaagagaaccccagctctgccatgaaaaggggaaccaaatcaccrcagtcaactcagcattcttagacagattttctacccacaaaactctttccacaaatgacagtgtataaagttaagcaggaaaaaaagggaaactgttctg

SEQ ID NO: 15725 - DNA, 201 bp, Homo sapiens
gcggagattgcagtgagctgagatcgcgtcactgcactccagcctgggcaacagagcatgactctgtctcaaaaataaactgactcatcctaccctcaatraaagaatgacatttacactatacttgtcttaaattcaaattcttaatggatttcaataagcttgaagaaagtaacagcattttctgaaaatcaagatcca

SEQ ID NO: 15726 - DNA, 201 bp, Homo sapiens
gggcaacagagcatgactctgtctcaaaaataaactgactcatcctaccctcaataaaagaatgacatttacactatacttgtcttaaattcaaattcttmatggatttcaataagcttgaagaaagtaacagcattttctgaaaatcaagatccaaatttacttacctgttctggattccagtagaatcattttttagcc

SEQ ID NO: 15727 - DNA, 201 bp, Homo sapiens
actctgtctcaaaaataaactgactcatcctaccctcaataaaagaatgacatttacactatacttgtcttaaattcaaattcttaatggatttcaataarcttgaagaaagtaacagcattttctgaaaatcaagatccaaatttacttacctgttctggattccagtagaatcattttttagcccaaagtaaatggcac

SEQ ID NO: 15728 - DNA, 201 bp, Homo sapiens
ttgcattgagtcctgggcagaagttttgtcccaaaaattcattatgctgcaaagcctataacacaagtgggagcagggcaaggtaaacagttttaaatttyaagaagtttccaaagagttatcacaatcatgccctctgagtttaatctttattgttatttctaaaaacatattcacagtctttgtctcaccaaaccaact

SEQ ID NO: 15729 - DNA, 201 bp, Homo sapiens
gattgcaccattgcactccagcctgggagacagagcgagcgagactctatgtcaaaaaaaaaaaaaaaagctaggcatgtcagttactcaggaggccgagrtgggaggactgcgtaagccccgcaggtcaaggcagcaatgagccatgatcatgtctctggactccagcctgggcgacaaagcaagaccctgtctccaaaa

SEQ ID NO: 15730 - DNA, 201 bp, Homo sapiens
accacacctggctgaaagagatatttgtacacctagggagcactgtttacaacagccaaaaggtgaaagcaacccaagtttccatctatagatgaatggaraaacgaaatgtggtatgtacatacaatggaatattattcaaccttacaacggaaagaaatctgacacatgctacatgaatgagccataaagacaacatgc

SEQ ID NO: 15731 - DNA, 201 bp, Homo sapiens
agtttttaccaacccacacttaacacactatgggacccagaatcagtttgcaccagggcatcattttctgaaaaaccactttgaactgtcagttttaaacygcatacccactttcaaatgaaactgcgaaaggctaaaaaactcagtcgtctcgtttgaacggttaccgattttctaacaaatatatacacaacgcccacc

SEQ ID NO: 15732 - DNA, 201 bp, Homo sapiens
atgtacatttgggaaaatgtgatccatccttgaaaaatacccagcctgggaaacatagtgagaccttctctctacaaaaaaattaaaaaaaaaaaaaaaayagccaggcgccccggtgcagtggctcacgcctgtaatcccagtgctttgggcggccaaagggggtggatcacctgaggtcaggagtttgagaccagcctg

SEQ ID NO: 15733 - DNA, 201 bp, Homo sapiens
gtagagattgcagtgagccaagattgcaccattgcactccagcctgggagacagagcgagcgagactctatgtcaaaaaaaaaaaaaaaagctaggcatgycagttactcaggaggccgaggtgggaggactgcgtaagccccgcaggtcaaggcagcaatgagccatgatcatgtctctggactccagcctgggcgacaa

SEQ ID NO: 15734 - DNA, 201 bp, Homo sapiens
gccaatgctgcagacctaagctgccaattctttgctgttctcacctatcttcaccactcaattgatttctatagctcctaaggagactggacaaacaccamtcttgtttctaggataaagggtctcttaaggacacttcaataagcaaagggttaagggttacgttatgatataatttatctgagaaaatcctatttatat

SEQ ID NO: 15735 - DNA, 201 bp, Homo sapiens
agccaaccaaggaacaaagaaacattatctcattttgattaacagaaagttaatctaacaatgaatagccttgttctgtgaactcaaatttgcttactacrtttgtttcacctgtaaactgtctaaggaaggtaaatgacaaggaacagcactttgcacacaggctcttcccttggagtggccagcacatactccctttca

SEQ ID NO: 15736 - DNA, 201 bp, Homo sapiens
acacgcctgtagtctcagctattcaagaggctgaggtgtgaggatcacttgagcccagggaggtcagggctgcagtgagctgagttcatgccaccacactscagcctgggcaacagagtgagactctgtctcaaaaaaagggaagctttccaaaagtaaaacttaattgtcctttatttgttctgctgactggttctatat

SEQ ID NO: 15737 - DNA, 201 bp, Homo sapiens
ggactcttccctctaaatgtgtaaaacaacatactaatgattgggcaaattttcaaggtgcatttatctatagctcttgatgcatcttctttataaacagstccctaataactgcctctaaaatcaccataagcttgttattcactaaggctccactgtcagaaaagctttccaggtttctaaaatacctactcaaataaa

SEQ ID NO: 15738 - DNA, 201 bp, Homo sapiens
ttacaggcatgagccaccatatccagccacatgtggtgcattttttaaaaaagtctggcagttactttgagagttaaacatatacctaaaatgtggcccarttatttcactcctagtttagctaaaacaaatgaaagcatgtgtctgtatatctgtgcaaagacttgtacaaaaatgttcatagccagtttcttggaaata

SEQ ID NO: 15739 - DNA, 201 bp, Homo sapiens
gagttaaactggctaggtgctctaggaccccacatcatggcagcacagtgatctggagaacgcggcctaattcccgacagacaggaagagaccccatcacmaaagggctgtatggtcagtgagaagccactgaggccttttaatcaggaaaggctcacaaccctaatgatgtttataaaggaacactctgggccaggccag

SEQ ID NO: 15740 - DNA, 201 bp, Homo sapiens
agaattccttgcaaatctgcaatttctaaaagtcatatttggatttgaaaactgaatttctctacagaggctggctatcataaaagcagggaactattttygtttcctgcagagttcttcagactctgttctcaattattcctattaagtgaaagattaaatcaatgtgtcacactctgttgcaaggtagcttaataaaga

SEQ ID NO: 15741 - DNA, 201 bp, Homo sapiens
aagggacagattgcctcctcaaatgggtccttgacccctgtgcctcctgattgggagacacctcccagcaggggtcgacagacacttcatacaggagagcyccagctggcatctggcgggtgcccctctgggaacaaagcttccagagaaaaaaaacaggcagcaatctttggggtatctttgctgttctatagcctctgc

SEQ ID NO: 15742 - DNA, 201 bp, Homo sapiens
tgccactgcactccagcctgggcaacaagagcaaacctccatctcaataaaataaaataaaataaaataaaataaaataaaataaaataaaataagaatgmggagatatatccaaagaatgagagacggagagagggaagaacccaccttgaaagatctcccaccaaatcaggaacaataagagtatgaaggtaaaacata

SEQ ID NO: 15743 - DNA, 201 bp, Homo sapiens
ttaaagacaatttttactgcagcagaatactgaggggttgtgccacatgttcacatgcattcgcgcacaactcactttatggatgagaaaacgtaggctcrgaaaaattcagtgcccctggaaggactcatacagatctaagcccagtagcctttatacatcacaccatggtagtaacaaaacccattttgacactgaaca

SEQ ID NO: 15744 - DNA, 201 bp, Homo sapiens
tctaaaagtcatatttggatttgaaaactgaatttctctacagaggctggctatcataaaagcagggaactatttttgtttcctgcagagttcttcagacyctgttctcaattattcctattaagtgaaagattaaatcaatgtgtcacactctgttgcaaggtagcttaataaagatgttagcactagcaagataaagtc

SEQ ID NO: 15745 - DNA, 201 bp, Homo sapiens
aacactatctgattccatacaaaagaatttattttacttgagtgaggaaccaacttttatgcttattctttaaaaaataatcagcctttccagacatcaamataggctgcacataagcgtcttcaactttcctcaatagtaaaatggggatactaccatctaccccctctaaatcactgggtggtaacctgagactatgga

SEQ ID NO: 15746 - DNA, 201 bp, Homo sapiens
gtgagctatgattgcaccactgcactccagtatgagtgacagagtgagacccagtctctaaaaaaaaaaaaatgtgtaaagaaaagaataacaaaaaccayaaggagtaataatcaccaactatcacagagccaaccaaggaacaaagaaacattatctcattttgattaacagaaagttaatctaacaatgaatagcctt

SEQ ID NO: 15747 - DNA, 201 bp, Homo sapiens
taagcaactgcaccacagtgcttaaacccaagactccctgagcatttactgcctgttgtacttgaactatcacaattgtacaatggctggtgggtacaagrgtgaaatgtagctttcactttgctcattaactggggtatctctcagtgaaacgctgcacaaagacaatgggagttaggtaaaccaggagcaagatctaac

SEQ ID NO: 15748 - DNA, 201 bp, Homo sapiens
tgcctcggcctcccaaagtgctgggattacaggcatgagccaccatatccagccacatgtggtgcattttttaaaaaagtctggcagttactttgagagtyaaacatatacctaaaatgtggcccaattatttcactcctagtttagctaaaacaaatgaaagcatgtgtctgtatatctgtgcaaagacttgtacaaaaa

SEQ ID NO: 15749 - DNA, 201 bp, Homo sapiens
taattgcggagtttatagcatcattattatcaaaaggggcttagccaagcagtcaggaacaggagacatttctctgaatttatagctccagactttatgtmggaagttgttatgcaccttcaatcagcaaagaaggtaaactccaaaattgtttgcaattacataataatttccttaattaataagtatatttaaattcta

SEQ ID NO: 15750 - DNA, 201 bp, Homo sapiens
cctactggggaggctgaggtgggaggatcccttgagggtccatgagacggaggctgcagtgaatcgtgattgtgccactggaatccagcctaagcaacagmgtaaccctgtcaaaaagaaagaaaagcaaagaaaaaggagaaagaaggaaggaaggaaggaaggaaggaagaaggaaggaagggagggaggaagggaggg

SEQ ID NO: 15751 - DNA, 201 bp, Homo sapiens
ctcttgagcacaggagatcagcttgggcaacatgacaagaccctgtctcaaaaaaacgtacctaaactctctagcaatatataccagtatttagataacarctttaacaattcagcattaaaacgttctgcaagcttgggtcacagagcatgaactttcttcttcttcatgctctttgcccttgtgtctatcctacactaa

SEQ ID NO: 15752 - DNA, 201 bp, Homo sapiens
gaattccttgcaaatctgcaatttctaaaagtcatatttggatttgaaaactgaatttctctacagaggctggctatcataaaagcagggaactatttttrtttcctgcagagttcttcagactctgttctcaattattcctattaagtgaaagattaaatcaatgtgtcacactctgttgcaaggtagcttaataaagat

SEQ ID NO: 15753 - DNA, 201 bp, Homo sapiens
atataaaaatacagagaatatatataatatatagggtacatataatatatatggatatctatatccttaagtacatttctactttataagaaaataaaccrtactttaaaaaaagttcctggccaggcgcgctggctcaggcctgtaatcccagcactttgggaggccgaagcgggtggatcacgaggtcaggagatggag

SEQ ID NO: 15754 - DNA, 201 bp, Homo sapiens
ttttaaaaagtactggtaatcctccggatcccatccttggccccaaccccagatgtaatcagtctaaccaatagcccctgctgctggacagccccgttccyagaacaaagacctactcacatgaagagcttcttctctaccacaaagagttccacggctgaaacactgctgaaacactggttggtcgtcaggaagaagaga

SEQ ID NO: 15755 - DNA, 201 bp, Homo sapiens
accaaagtgatggattgataggtgtagcaaaccaccatggcacacgtttaactatgtagcaaacctgcacatcctgcacatgtaccctagagctttggggraaaaaaaaaaagatagcaagcttaagtcacaaatacaaattatgagcccaggagttcaaagctgcagtgagctatgactgcactactgcacaccagcctg

SEQ ID NO: 15756 - DNA, 201 bp, Homo sapiens
ttcttctttatttctctggatttttctaccaagagctttaatggccagatttccagtcctcttcaaagttccagttgaggaccaggttactccatgtcctytccaaatgcttcctgctgcacaatataaaaggcccactgcctttagatcctgtgatatattctgtgctgggttaagacatggcatctacacagcacacaa

SEQ ID NO: 15757 - DNA, 201 bp, Homo sapiens
gactacctggtctttgggaaaaaaccacgcaactacagttatccacagcacctagaaccagacctgacatgcgttgcaaatgctcaataaatacctgctcrcacacaaaaaaaagtggcttttaaaagcacattaaaagtgcacagaaaacgcttacttatactctcttatactcacgaagatttgcctccacctgtgggt

SEQ ID NO: 15758 - DNA, 201 bp, Homo sapiens
tttttaagaaataacaatttcaggtaggcaattgtgaggaaaataacaatcatacaagccaaggccacgtgattcttccacaagccccagggtgagagatygatgccctgctttaccaaatattcttcgccagtacatctgaaattaaacagaaaaagaatataacttcattcctagcatccgtcaaatgttactcagtat

SEQ ID NO: 15759 - DNA, 201 bp, Homo sapiens
gagactttcacagctcatggtcagggaaatgagatgaggacacttgatttccattgttcctagcttgggaatgcagtcacagtgacagacaaggaagacayaccgtaaatccatatcgtggaatgctgaagtactgaagccatgacagccaagatgcaatggttgtgagattgaccaacagacctgaaaaaatctacaaaa

SEQ ID NO: 15760 - DNA, 201 bp, Homo sapiens
acatgacaagtgaatgtgcaggaagaaatgaaggaaagaaacaattccttatcagagcaaacacagttcagactcaccatcataaacacaaaacagatggycatgagaagtgttgctacagaaaccacactctgacctgctgctatggccagtgccatggaactggctgaataagccaccatcataagggtaaacatcata

SEQ ID NO: 15761 - DNA, 201 bp, Homo sapiens
atcagagcaaacacagttcagactcaccatcataaacacaaaacagatggtcatgagaagtgttgctacagaaaccacactctgacctgctgctatggccmgtgccatggaactggctgaataagccaccatcataagggtaaacatcataacgaagaaggcatctgcctttggcttcaatccttagtcagaaagagaaga

SEQ ID NO: 15762 - DNA, 201 bp, Homo sapiens
aaaagtactggtaatcctccggatcccatccttggccccaaccccagatgtaatcagtctaaccaatagcccctgctgctggacagccccgttcctagaamaaagacctactcacatgaagagcttcttctctaccacaaagagttccacggctgaaacactgctgaaacactggttggtcgtcaggaagaagagaacccc

SEQ ID NO: 15763 - DNA, 201 bp, Homo sapiens
acctcaggattggtcaagatgcccctgataatactgcagtattttccaaatcttatcaaggaaataatctgtgtgacctctggccggttgcagtctgaaayacaggtttccccatttggaaaatgaaaaagatgaaacagcttgaggttttccaaacagcacaccgccaagcctctcatcattgagctgatgcttcagaat

SEQ ID NO: 15764 - DNA, 201 bp, Homo sapiens
caggaggctgaggcaggggaatcacctgaacctgggaggctgaggttgcggtaagccaagatcgcaccactgcactccagcctgagacagagtgagactcygtctcaaaaacaaacaattcctgaacatgaaaaaaaaaaaaaaaaaaaaaaagacagtctcccccacaagccctgaggccagaaggttccatctcaactg

SEQ ID NO: 15765 - DNA, 201 bp, Homo sapiens
aggtggatcacgaggtcaggagacgagaccatcctggctaacatggtgaaactccatctctactaaaaatacaaaaaattagccaggtgtggtggtgggcrcctgtaatcccagctactcaggaggctgaggcaggagaatggcgtcaacccgggaggtggagcttgcagtgagcggacatcgtgccactgcactccagcc

SEQ ID NO: 15766 - DNA, 201 bp, Homo sapiens
atcatagaaaaggcacgtgttactaaattcttaaaacaatattatccagtgttattagaatctgttttaacattatgtgaaaacggggtttttttctcaayttattcaagtgtttcttgtttttttagaggataaatcgattgatagggagtattccaagttaatttaaaaacaacaacacatgactatgcggcctttgat

SEQ ID NO: 15767 - DNA, 201 bp, Homo sapiens
aatcattttatgtatctctaagagattaaatatgtttaatcattctatatatctctaagtgtgtgtatgtatatatatatacatatatagagagagacagggagagatagatagatagatagatagatagatagatagatagatagatagatagacagatagaaaacatagataggctataaatatcccagcttctccagc

SEQ ID NO: 15768 - DNA, 201 bp, Homo sapiens
attttatgtatctctaagagattaaatatgtttaatcattctatatatctctaagtgtgtgtatgtatatatatatacatatatagagagagacagggagwgatagatagatagatagatagatagatagatagatagatagatagatagacagatagaaaacatagataggctataaatatcccagcttctccagcatag

SEQ ID NO: 15769 - DNA, 201 bp, Homo sapiens
ggtcaggagttcaagaccagcctaaccaacatggtgaaaccctgtctctactaaaaatacaaaaattagctgggcgtggtggcaggtgcctgtagtcccarctactcaggaggctgaggcaggagaatcgcttgaacctgggacgtggaggttgcagtgagctgagatcgcgccactgcactccagcctgggtgacagagc

SEQ ID NO: 15770 - DNA, 201 bp, Homo sapiens
ctttcacactaaaacggtagagctgactacctgagacaaacaccacctgatctgcaaagcctaaaatatttactacctgatcctttacaaaaaaaaaaaatatatattgcctactcctgccctaagctaatattccagtttttcacaaatcgaaacaaaacttgtcctgctaagcagatgctcagggagatacaaggtcct

SEQ ID NO: 15771 - DNA, 201 bp, Homo sapiens
cacgttgggaggccgaggtggcagatcacaaggtcaggagatcaagaccatcctcctggctaacagggtgaaaccctgtctctactaaaaaaatacaaaawaattagccgggcatggttgtgggcgcctgcagtcccagctactcaggaggctgaggcaggagaatggtgtgaacccgagaggcagagcttgcagtgagcc

SEQ ID NO: 15772 - DNA, 201 bp, Homo sapiens
aatgctgacagtgatatggacaatgaagtccaggttgaggtggtctcagatggagatgaggaacttgttgggaactggaataaaagtgactcttgctatgttttagcaaagagactggtggcattttgcccctgccctagagatctgtggaactatgaacttgagagagatgatttagagcatctggtagaagaaatttct

SEQ ID NO: 15773 - DNA, 201 bp, Homo sapiens
aaaagtgactcttgctatgttttagcaaagagactggtggcattttgcccctgccctagagatctgtggaactatgaacttgagagagatgatttagagcrtctggtagaagaaatttctaagcaacaaagcattcaagaggtgactcgggtgctgttaaaagcattcagttttattcattcacaaagatatggtttgaaa

SEQ ID NO: 15774 - DNA, 201 bp, Homo sapiens
gtttcctaggccaggcccagggccttgctgctttgtacagtctcgagacttggtaccctatgtttcagccatggttaaaggggaccaacagagagttggcrgcttccatgtggtgttaggcctgcccttcacctagatttcagaggatgtatggaaatacctggatgtccaggcaaaagtcaactttaggggtggagccct

SEQ ID NO: 15775 - DNA, 201 bp, Homo sapiens
tggataaataatgaaatgaaggcagaaataaataaattctttgaaaccaatgagaacaaagacacaacgtactagaatctctgggacataactaaagcagwgtttagagggaaatttatagcactaaatgcccacaggagaaagtgggaaagatgtaaaatcgacaccctaacatcacaattaaaagaactagagaagcaa

SEQ ID NO: 15776 - DNA, 201 bp, Homo sapiens
agaaataactaatatcagagcagaactgaaggagatagagacaggaaaaaacccttcaaacaaatcaacgaatccagggctggttttttgaaaagtttaayagaatacatagacctcaagctagactaataaagaagagagaagaatcaaatagacacaataaataatgataaaggggatataatcactgatcccacagaa

SEQ ID NO: 15777 - DNA, 201 bp, Homo sapiens
aaaaccccagaagaaaacctaggcaatacccttcaggacataggcatgggcaaagacttcatgactaaaacactgaaggcaattgcaacaaaagccaaaaytgacaaatgggatctaattacactaaagagcttctgcacagcaaaaaaaaaaaaagaaaaaaaaaaactatcttcagagtgaacaggcaacctacagaat

SEQ ID NO: 15778 - DNA, 201 bp, Homo sapiens
aagacttcatgactaaaacactgaaggcaattgcaacaaaagccaaaactgacaaatgggatctaattacactaaagagcttctgcacagcaaaaaaaaaraaagaaaaaaaaaaactatcttcagagtgaacaggcaacctacagaatgggagaaaaattttgcaatctatctgacaaagggctaatatccagaaactac

SEQ ID NO: 15779 - DNA, 201 bp, Homo sapiens
cacatgtatactatgtaacaaacctgcacgttctgcacatgtatcccagaactttagtgaaagataaaattttttaaaaaaagcacctgcttttaacagtktgttcttcaccaagtcaaatatgtagtttgaagttcagaacactaaaagataggtgacatggtgaaatcacagtctaaaaagggagataaagtcaggaga

SEQ ID NO: 15780 - DNA, 201 bp, Homo sapiens
agacggaggctgcagtgaatcgtgattgtgccactggaatccagcctaagcaacagcgtaaccctgtcaaaaagaaagaaaagcaaagaaaaaggagaaagaaggaaggaaggaaggaaggaaggaagaaggaaggaagggagggaggaagggagggagggagggaacaggagaaagaaaggaaggaaaaagaaagaaaga

SEQ ID NO: 15781 - DNA, 201 bp, Homo sapiens
gacggaggctgcagtgaatcgtgattgtgccactggaatccagcctaagcaacagcgtaaccctgtcaaaaagaaagaaaagcaaagaaaaaggagaaagaaggaaggaaggaaggaaggaaggaagaaggaaggaagggagggaggaagggagggagggagggaacaggagaaagaaaggaaggaaaaagaaagaaagaa

SEQ ID NO: 15782 - DNA, 201 bp, Homo sapiens
acggaggctgcagtgaatcgtgattgtgccactggaatccagcctaagcaacagcgtaaccctgtcaaaaagaaagaaaagcaaagaaaaaggagaaagaaggaaggaaggaaggaaggaaggaagaaggaaggaagggagggaggaagggagggagggagggaacaggagaaagaaaggaaggaaaaagaaagaaagaag

SEQ ID NO: 15783 - DNA, 201 bp, Homo sapiens
cggaggctgcagtgaatcgtgattgtgccactggaatccagcctaagcaacagcgtaaccctgtcaaaaagaaagaaaagcaaagaaaaaggagaaagaaggaaggaaggaaggaaggaaggaagaaggaaggaagggagggaggaagggagggagggagggaacaggagaaagaaaggaaggaaaaagaaagaaagaaga

SEQ ID NO: 15784 - DNA, 201 bp, Homo sapiens
cattcctgtcttcttatattaataagaaaaataaaacaaaatagtggtaaagtgttggggtggtgaaaatttttggggggtggtatggagagagaatgggygatgtttctcagggctgcttcaagtgggattaggggcggcgtgggaacctaaagtgggagagattaagctgaaggaagattttgtggtaaggggtgatat

SEQ ID NO: 15785 - DNA, 201 bp, Homo sapiens
gaaaaataaaacaaaatagtggtaaagtgttggggtggtgaaaatttttggggggtggtatggagagagaatgggtgatgtttctcagggctgcttcaagygggattaggggcggcgtgggaacctaaagtgggagagattaagctgaaggaagattttgtggtaaggggtgatattgtggggttgttagaagaaacaatt

SEQ ID NO: 15786 - DNA, 201 bp, Homo sapiens
aggatatggaaggcatatttagagtcagtataaatattgatgtgtagtccctttgcaagagcaagggcttgacttcaggcaatgagttcggcttgctgagmggtagtggaggggggcagagtggtagcctcaatgatagatgtggaagatactatagcatagcctgcctttgctggtgagtggcaattaggactggtggaa

SEQ ID NO: 15787 - DNA, 201 bp, Homo sapiens
actttgggaggaggccagaggattgcttgagcccaagaattcgagacaagcctaggcaacacagggagcccctgtctctacaaacaatttttttttttaatttttttttttttattatactctaagttttagggtacatgtgcacattgtgcaggttagttacatatgtatacatgtgccatgctggtgcgctgcacccac

SEQ ID NO: 15788 - DNA, 201 bp, Homo sapiens
ttttttgagacggagtcttgctctgtcacccaggctagagtgcaatggtgtgatctcagctcactgcaacctctgccttgcgggttcaagcgattctactrcctcagcctcctgagtagctgggattacaagcacttgccaccatgcctggtaatttttgtatttttagtagagacagggttttgccatgttggccaggct

SEQ ID NO: 15789 - DNA, 201 bp, Homo sapiens
aatgataacaaccagtcattatcatttggtgagctcctaacgtgtgccagtcctgtaagagacactttatctcattaagttcatttattctgaacagcaartaagtggatacctggtagaaaaagtaggtatctcttttatcagatgagtaaacttaggttcaggtcacagctggtcagtaactaagcctgatacaaagca

SEQ ID NO: 15790 - DNA, 201 bp, Homo sapiens
agaacggaaaaactggtaccagtgactgcaaaaacataccaaattgtaaagaccatcaacactatgaagaaactgcatcaattaatgggcaaaataaccarctaacatcataatgacaggatcaaattcacacataacaatattaacctgaaatgtaaatgggctaaatgccccagttaaaagacacagactagcaaattg

SEQ ID NO: 15791 - DNA, 201 bp, Homo sapiens
tctggtctaagtccatgaccaaaatagtgctaaagtaccttttcacaggagttatgacttacaggttgataaggtttggctgtgtgcccacccaaatctcrccttcaattgtaacaatccccacatatcaaggatggggccaggtggagataattgaatcatgggggaagttcccccatactgttctcgtggtactgaaaa

SEQ ID NO: 15792 - DNA, 201 bp, Homo sapiens
ggcttgtaacctacatggaagaggttatgaaatgatgacagaatagaatgggcctgtgaggctggaaggagatattttccttggtctaagaaccatttgcyttgtgtgggaagagattgataggtggaagtttcagtgggggagtaggtgggagtgaccaatgcgaagaagaaaaactgaccctgagggacagaagttgga

SEQ ID NO: 15793 - DNA, 201 bp, Homo sapiens
aagcctctgggaaattcgaactgggtagagccgaccacagcttggcaaagccactgtagccagactgcctctctagattcctcctctctatgcagggcatytctgaaagaaaggcagcagccccagtcaggggtatatagataaaactcccacctccctgggacagagcagctgaggtaaggggaggctgtgggcacagct

SEQ ID NO: 15794 - DNA, 201 bp, Homo sapiens
gttttattcattcacaaagatatggtttgaaattggaacttatgtttaaaagggaagcggagcatacaagctcagaaaatttgcagcctgatgatgcgatwaaaaagaaaaacccattttctgaagagaaattcaagcctgctacagaaatttgcataagtaatagggaaccaaatgttaatcaccaagacaatggggaaa

SEQ ID NO: 15795 - DNA, 201 bp, Homo sapiens
ctgccctaataatgcaattaacataactgagtacttactatgtctttgctaaataatttagagataacttcatttcaattttcacaatattgtcatgaggyagttccaatattattattattaccctcattttataaatatgtcttaaaggatcaagcaactggccaagggatcacagttagtaagaggcaaggctgggat

SEQ ID NO: 15796 - DNA, 201 bp, Homo sapiens
tatgtgtgtgtctgttggtgttgagtaaagaagctaaagagacagcagcaaaacaggcccaacccccctacaccctcatcacagacatccttccctacatycttacctgctttgtttttcttgataatgcttttcatttgttaactgactttcactccaacagaagaggaagaaattactttgatcatttctgaaccccct

SEQ ID NO: 15797 - DNA, 201 bp, Homo sapiens
gaagatgattgttcgtccctgcttagacatcctaagttaaaagtgagacaatactaagtcattaaatatctgaaacttgtatttctcagtaaaatactctrttcttgcctttagattgtttgctctagttcagcctgactttgtcttactaacttttcatctcatattatttagctatagttagcaaacctaaattcaatg

SEQ ID NO: 15798 - DNA, 201 bp, Homo sapiens
ccagctgattcaaagtatcccaaggcctcctgagcaggcccgtggaacataagtcttcctgaggccaataaggtgaggctatcaaacaacttgaagatggratatcgaggctgatgaatggagaagatgattgttcgtccctgcttagacatcctaagttaaaagtgagacaatactaagtcattaaatatctgaaacttg

SEQ ID NO: 15799 - DNA, 201 bp, Homo sapiens
ttgctgtgcttgagtctaagccagttgtaggctcatccaagaacaagatggaaggatcagtgataagctccattcctatactagtcctttttctttctccyccagacacaccacggataaactgagttccaacctaaatcacaaatattataattgtcaatgataacaaccagtcattatcatttggtgagctcctaacgt

SEQ ID NO: 15800 - DNA, 201 bp, Homo sapiens
aactatggactgcatattaaaacaatggtcatatatctcattctgacttatcatttaggtcttctggctctttaaaaattggttttcactcttctgccctrataatgcaattaacataactgagtacttactatgtctttgctaaataatttagagataacttcatttcaattttcacaatattgtcatgaggcagttcca

SEQ ID NO: 15801 - DNA, 201 bp, Homo sapiens
gtgacttggacgtgagatatggaatcaaagaagataatttcagagctttaagatttgactgcccctttggatttcggacttgcgtgggacctgtagccccytcgttttggccaatttctcccatttggaacaggtgtatttacccaatgcctgtactcctattgtatctaggaagttactaacttgcttttgattttacag

SEQ ID NO: 15802 - DNA, 201 bp, Homo sapiens
ggaataaaagtgactcttgctatgttttagcaaagagactggtggcattttgcccctgccctagagatctgtggaactatgaacttgagagagatgatttrgagcatctggtagaagaaatttctaagcaacaaagcattcaagaggtgactcgggtgctgttaaaagcattcagttttattcattcacaaagatatggtt

SEQ ID NO: 15803 - DNA, 201 bp, Homo sapiens
caaaaatctggaagccactttggaactgggtaacaggcagaggctggaacagtttggagggctaagaagaagacaggaagatgtgggaaagtttggaaccycctagagacttgttgattggctttggctgaaatgctgacagtgatatggacaatgaagtccaggttgaggtggtctcagatggagatgaggaacttgttg

SEQ ID NO: 15804 - DNA, 201 bp, Homo sapiens
ctatagttaccagaaaattaagtagtgtctgccggtcacagtggctcacacctgtaatcccaacactttgggaggccacagcagattgctttagctcaggrgtttgagaccatcctgggcaacatggcaagaccccgactctacaaaaaatacaaaaattagatagccatggtggcatgtgtctatagtcccagctgcttg

SEQ ID NO: 15805 - DNA, 201 bp, Homo sapiens
ggagaaataaattcctttacagacaagcaagtgctgagggattttgtcaccaccaggcctgcctttcaagagttcctcaaggaagcactaaatatagaacrgaaaaactggtaccagtgactgcaaaaacataccaaattgtaaagaccatcaacactatgaagaaactgcatcaattaatgggcaaaataaccaactaac

SEQ ID NO: 15806 - DNA, 201 bp, Homo sapiens
tcactcttctgccctaataatgcaattaacataactgagtacttactatgtctttgctaaataatttagagataacttcatttcaattttcacaatattgycatgaggcagttccaatattattattattaccctcattttataaatatgtcttaaaggatcaagcaactggccaagggatcacagttagtaagaggcaag

SEQ ID NO: 15807 - DNA, 201 bp, Homo sapiens
atctccttgaagactgtgatcttcttcttcttctcacccccggaaagttgatgtaattcagcttttgtctctttgtagaaggaggagttgacataaatctmcgctaatttttctatgagtggcttatcctgcttggaaggctctatgatctctgtggctttgcaatcagtggataaaaaggaaacacaaacaagataacaa

SEQ ID NO: 15808 - DNA, 201 bp, Homo sapiens
aatgggaagacaggcacaacttggaatgcataaactccaattagatgtcaaatacatccctaataagtaaatgggtcctaataagtaaataggaagagtawgaaaattacaaaaaactgataaagcaggaaaaggatggatgagggttagacttgtctggcttgaaaagcatattatgatataagtcaagtgcagggacag

SEQ ID NO: 15809 - DNA, 201 bp, Homo sapiens
ataaagtctgtaaagattaagaaattcaattagccactttgattttaaagttgaacaaagaatgtaagtcatgtggaagcaaaatgaaagacagtgaaggraaccttcaatcaaccccttattatatgcataatctacatgcaccacactaccatcagcagggccgtgacattatccttgaccacgctaagacagccagcc

SEQ ID NO: 15810 - DNA, 201 bp, Homo sapiens
cgtagagtaacactatctgattccatacaaaagaatttattttacttgagtgaggaaccaacttttatgcttattctttaaaaaataatcagcctttccaracatcaaaataggctgcacataagcgtcttcaactttcctcaatagtaaaatggggatactaccatctaccccctctaaatcactgggtggtaacctgag

SEQ ID NO: 15811 - DNA, 201 bp, Homo sapiens
ggtggccatttgggcagacactgagacagctgcaggagtttttttttcataccccagtggtgcctggaatgccagcgcgacaaaactgttcactcccctgkaaaaggggctgaagccagggaaccaagtggtctagcctagctcagcggatcccagccccacagagcccagcaagctaagatccactggcttgaaattctt

SEQ ID NO: 15812 - DNA, 201 bp, Homo sapiens
tcacttgaacccaggaggtggaggttgcagtgagccgagatcacgtcattgtactccagcctgggcaacagagcaagactccgtctcagaaaaaaaaaaaraagaagaagaaaggagacttcagggtggggcctggcttgttcctttcaaaacacaggtatctatgcccattctctccttagaattgataagtaagttaca

SEQ ID NO: 15813 - DNA, 201 bp, Homo sapiens
taatgccagcactttgggaggccgaggcaggcggatcacatgaggtcgggagttcgagaccagcctgaccaacatggagaaaccctgtctctactaaaaayacaaaattagttgggcatggtagcgcatgcctgtaaccccagccactcgggaggctgaggcaggagaactgcttgaacctgggaggcagaggttgcggtg

SEQ ID NO: 15814 - DNA, 201 bp, Homo sapiens
gggaggccgaggcaggcggatcacatgaggtcgggagttcgagaccagcctgaccaacatggagaaaccctgtctctactaaaaatacaaaattagttggrcatggtagcgcatgcctgtaaccccagccactcgggaggctgaggcaggagaactgcttgaacctgggaggcagaggttgcggtgagctgagctcgcacc

SEQ ID NO: 15815 - DNA, 201 bp, Homo sapiens
aaaaaataataataataattcgatatttactagacttctattatctggcaggcactggacttacaggagtgaacaaaacaaaacaacagataaacatcccrgccctcagtgaggttacatatgaaaaatatcagtcaacagtgctacggagaaaaaaaattaaagcaaaagaggaagggtgggccagaaatggtggctcac

SEQ ID NO: 15816 - DNA, 201 bp, Homo sapiens
ggagtgaacaaaacaaaacaacagataaacatcccggccctcagtgaggttacatatgaaaaatatcagtcaacagtgctacggagaaaaaaaattaaagyaaaagaggaagggtgggccagaaatggtggctcacgcctgtaatcccagcactttgggaggccgaggtgggtggattgcttgaggcccggaatttggaga

SEQ ID NO: 15817 - DNA, 201 bp, Homo sapiens
tcagtgaggttacatatgaaaaatatcagtcaacagtgctacggagaaaaaaaattaaagcaaaagaggaagggtgggccagaaatggtggctcacgcctrtaatcccagcactttgggaggccgaggtgggtggattgcttgaggcccggaatttggagaccagcctggacaatatggtgaaatccttatctctattaaa

SEQ ID NO: 15818 - DNA, 201 bp, Homo sapiens
gaaggcctttccagtgaggccctcaagcagagctctgagggtggccttctggaggagcagtatatgtccaagtgctggtcgaaggaacagcaaagaggccmgtgaggctgaagcagagtgagggaggataagagagcaggaactcgggttgtatctaccactgaccacaggaaggactttggctttgatctgaatggcact

SEQ ID NO: 15819 - DNA, 201 bp, Homo sapiens
ttaaaggatcactctgactttggtcatgggtagggacaatgcagggagaccacataagagtccaccataataatatcaagagccaagatgaggacactgtyctgcacccctccctccatagcctatgagagctccctgaaacctattatctgtgcatgttctgcaaaatcgcctgccccaaacaattccatttcctgacct

SEQ ID NO: 15820 - DNA, 201 bp, Homo sapiens
acaagtttttgggggcgcagtccaagttggtctggtgtctggaatgagactggggcctaataaaaaggagcatctatacaggagctcaaatgggctgtatyttgtcgcattccgaagacaggcccgaattctgagaagggcaagtggtaaaagtattatccagtcctttttaagttggtggctgagcttggtgaggtgtgt

SEQ ID NO: 15821 - DNA, 201 bp, Homo sapiens
caagtttttgggggcgcagtccaagttggtctggtgtctggaatgagactggggcctaataaaaaggagcatctatacaggagctcaaatgggctgtattytgtcgcattccgaagacaggcccgaattctgagaagggcaagtggtaaaagtattatccagtcctttttaagttggtggctgagcttggtgaggtgtgtt

SEQ ID NO: 15822 - DNA, 201 bp, Homo sapiens
caagtggtaaaagtattatccagtcctttttaagttggtggctgagcttggtgaggtgtgtttttaaaagaccagtagtccgttctacctttcctgaagaytgaggatggtaagggatataaatgtttcactgaataccaagagcccgaaaaactgcttggctgatttgactaataaaggccggtcctctattgaaccgta

SEQ ID NO: 15823 - DNA, 201 bp, Homo sapiens
atgtttcactgaataccaagagcccgaaaaactgcttggctgatttgactaataaaggccggtcctctattgaaccgtatagaggtgggaaggccaaaccraggaattatgtctgacagaagggaagatatgaccgtcgtggccttctcagaccctgtgggaaaggcctctacctatccagtgaaagtgtctacccagacc

SEQ ID NO: 15824 - DNA, 201 bp, Homo sapiens
ccaagaataagccatcagcattcacaagcgcattcatagagtgggcttcaagaagtgtgtccctggggcactcagagagatccggaaatttgccatgaagkagatgggaactccagatgtgtgtgttaataccaggttcaacaaagctgtctgggccaaaggaataaggaatgttccataccgcatctgtgtgcagttgtt

SEQ ID NO: 15825 - DNA, 201 bp, Homo sapiens
cctgggaggcagaggttgcggtgagctgagctcgcaccattgcactccattctgggcaacaagagcgaaactctgtctcaaaaaataataataataattcratatttactagacttctattatctggcaggcactggacttacaggagtgaacaaaacaaaacaacagataaacatcccggccctcagtgaggttacatat

SEQ ID NO: 15826 - DNA, 201 bp, Homo sapiens
cagaggctgcagtgagccaagatcatgtcactgcactctagcctgggtgacaacgtgagactccatctcaaaaaaaaaaaaaaaaaaaaaaaacctatacrtagaaaattgctgggcaaggagtgacagctcactcctgtaatcccaacactttgggaggcagaggccaaagaattgcttgagcccaggagttcaagacca

SEQ ID NO: 15827 - DNA, 201 bp, Homo sapiens
ctgaataccaagagcccgaaaaactgcttggctgatttgactaataaaggccggtcctctattgaaccgtatagaggtgggaaggccaaaccaaggaattmtgtctgacagaagggaagatatgaccgtcgtggccttctcagaccctgtgggaaaggcctctacctatccagtgaaagtgtctacccagaccaagaagta

SEQ ID NO: 15828 - DNA, 201 bp, Homo sapiens
tgagatgaggacacttgatttccattgttcctagcttgggaatgcagtcacagtgacagacaaggaagacataccgtaaatccatatcgtggaatgctgawgtactgaagccatgacagccaagatgcaatggttgtgagattgaccaacagacctgaaaaaatctacaaaaagcaaatactaagagtcaggcctgcttga

SEQ ID NO: 15829 - DNA, 201 bp, Homo sapiens
aggagaaataaattcctttacagacaagcaagtgctgagggattttgtcaccaccaggcctgcctttcaagagttcctcaaggaagcactaaatatagaayggaaaaactggtaccagtgactgcaaaaacataccaaattgtaaagaccatcaacactatgaagaaactgcatcaattaatgggcaaaataaccaactaa

SEQ ID NO: 15830 - DNA, 201 bp, Homo sapiens
tcctattgctgctctttctagctcctgaacactcagtccagggaaacagattccacacatcctccctctcttcaaagaatgcttcttttccttctttgacrggggctttccttgaagaacagcacttcagtagccgattttggcaggaatagaagcttttctttttccctatttctgatgaggaaggtggcctgttattct

SEQ ID NO: 15831 - DNA, 201 bp, Homo sapiens
atgacctgcaggtgttgtcaagccaatgacctgttataatcctactgctacatccaaaagaaaagttctttagacacagtacagtgaggtatcataaaacwgtatatattgccactaaagaatgcaaagcaatatagatagtatacatttatagtataaacagtataaatagcaacttatattcatttaactgagatttct

SEQ ID NO: 15832 - DNA, 201 bp, Homo sapiens
tcatttccaatgaatggcccataccattgtgataagaacatcctaaaaacctaaatgggaagacaggcacaacttggaatgcataaactccaattagatgycaaatacatccctaataagtaaatgggtcctaataagtaaataggaagagtatgaaaattacaaaaaactgataaagcaggaaaaggatggatgagggtt

SEQ ID NO: 15833 - DNA, 201 bp, Homo sapiens
tggagaaatggatcattccaaggttgggacatggaaaatacaaaataagcctgagcattctctgatgccagaaatcaagaaatgcattaaaaaagaaaaakagtccgggcatgatagctcacacctgtaatcccagcactttgggaggccgaggcgggcagatcacttgaggccaggagtttgagaccagcctggccaaca

SEQ ID NO: 15834 - DNA, 201 bp, Homo sapiens
ttaactgagatttcttttatgttaaaccacattaattcgtctccattatagattagttctgacatccaggaaaataaaatcaaaagaatatatatatatawaaaacataaaatgagcacataaaatttaccatcttaaccattttaaaattaaggaacttttttaaagtgtggtttattttcttataaagtagaaatttac

SEQ ID NO: 15835 - DNA, 201 bp, Homo sapiens
acagctatagaaacataaagatggaaactcccagggtgctgcgggaatggtcaccactgctcccccagctcttctcccgcccgctttggccagatctgtakgcacctgcacgtgggaggtagttttttaaaaagttatgcatgtatgtgtatgcgtatgtgtgtagacgtatacacatacatatcttctctaggtctcact

SEQ ID NO: 15836 - DNA, 201 bp, Homo sapiens
taccatctcagaccaaataatgtctcatcataaacacagtacttcttcattgctagtatgactaacataaatatgggtctcaaatccttttctcactgtgmattcaatcaacagataccaaaattataatattaggatgtagtttaagctactcagctaataaaatgatcctggtttcttaccagagcctaatagatagaa

SEQ ID NO: 15837 - DNA, 201 bp, Homo sapiens
aaataagcctgagcattctctgatgccagaaatcaagaaatgcattaaaaaagaaaaagagtccgggcatgatagctcacacctgtaatcccagcactttsggaggccgaggcgggcagatcacttgaggccaggagtttgagaccagcctggccaacatggaaaaccccgtctctactaaaaaatacaaaaagtagccaa

SEQ ID NO: 15838 - DNA, 201 bp, Homo sapiens
acttgttagctttgacaaatgcatcttgctatataaaatgttaacattaagggaagctgagcaaagagtagacaggaactttcctcactatctttgcaacwtttctgtcaatctaaaattatttccaaattaaaagtttattaaaaagtggggagataattaagtatcaacctatgcacacagaaacacaacacttggctg

SEQ ID NO: 15839 - DNA, 201 bp, Homo sapiens
acattatatatataattatatagatagaaattatatataggatataatatatagagaggatataaaaatacagagaatatatataatatatagggtacatrtaatatatatggatatctatatccttaagtacatttctactttataagaaaataaaccgtactttaaaaaaagttcctggccaggcgcgctggctcaggc

SEQ ID NO: 15840 - DNA, 201 bp, Homo sapiens
gacaaaaatagctgacagtgaacaactgtttcagagagtgcaaaatggacaggtgtttccttatctcatggtttggtttatagttttgagaaccaaaaatrtgcttgcaaggtgcaactgacttcacccataggcaagactaaagacatgtccttttttgttttgttacatacttacctaacatgaagtacactatacagg

SEQ ID NO: 15841 - DNA, 201 bp, Homo sapiens
attttatccacacagggaaagtcctacttatgctgatcatgatgctttcagtttttccacattaccttggagtctgccactttatccagacctaactcttsaatgaccctgttaatccgttcgtttttttcatgattcgtcatagttgttgcaagccgaagagctgctgagaactgtaagttttctctcaccgtcagagtg

SEQ ID NO: 15842 - DNA, 201 bp, Homo sapiens
aaatctcaatactgcaacagtctaatggtatcaagatttaaagtaactgatcaaggacacttttggcatgaagcaaaccgaactgcaaaaacagtaccatsatctgtgataactagtttgtgaagaacctagtctggaaagaacattattccaatgtttctacttatgagctgtcttttaaaattcacttagaaattttgg

SEQ ID NO: 15843 - DNA, 201 bp, Homo sapiens
ggagttcgaagccagcctggccaacatggtgcgaccctgtctatactaaaaatacaaaaattagctgggcatggtggcgggcacccgtagtcccagctackcgggaggctgaggcaggagaattgcttgaacccgggaggcggaggttacagtgagccgacacagcaccactgcactccagcctgggcgacagagcatgac

SEQ ID NO: 15844 - DNA, 201 bp, Homo sapiens
tgctttattgcccaagctgttctcacactcttggcctcaagcatccttctgccttggtctcccaaagtgctggggttataggcaggaaccactgcatctakccagcctttcgtttattattggaatactgccatgttcatttattcatgttatgagcttggctgctttcacactaaaacggtagagctgactacctgagac

SEQ ID NO: 15845 - DNA, 201 bp, Homo sapiens
tccttaactttctttctctcttcttcccacgtaattttaccctttctttttatatattcagtctctctctctctctgtctctctctctctctctctctctmtatatatatatatatatatatatataatttatttatttattttgagacagggtctccctctgtcacccaggctggaatgtggtggggcaatcttggttca

SEQ ID NO: 15846 - DNA, 201 bp, Homo sapiens
ccaaaagcccaggtgtgttctgctctctgagttcaccgacagaatgccagaatgatagaacccacattagcaatgactacttccccacatactaaattcaraggtccagcgctgggtgcaatggctcacatctgtaatactagcacttcgggaggccgagaccagcaaaccacttgagcccaggacttccagaccaaccta

SEQ ID NO: 15847 - DNA, 201 bp, Homo sapiens
tccagcctgggtgacacagtgagatcctatctcaaaagaaaaaaaaaaaaccttaaataaaatttgctgggtgcagtggctcacacctataatcccagcaygttgggaggccgaggtggcagatcacaaggtcaggagatcaagaccatcctcctggctaacagggtgaaaccctgtctctactaaaaaaatacaaaaaaa

SEQ ID NO: 15848 - DNA, 201 bp, Homo sapiens
caacatattaattactgagcttttaagaaatggtcactgtaactaggaagcagaatataggcccagtagaaatacacacatgcatgcacattgaaataagmcaagaaagatacctaaataacaagctggtgctacaaaaatgaagaaaaatactagcaccaaatggaacaaacacattttgaagtgatagattctcatggt

SEQ ID NO: 15849 - DNA, 201 bp, Homo sapiens
ttttaagaaatggtcactgtaactaggaagcagaatataggcccagtagaaatacacacatgcatgcacattgaaataagacaagaaagatacctaaatamcaagctggtgctacaaaaatgaagaaaaatactagcaccaaatggaacaaacacattttgaagtgatagattctcatggtatgtctacccaaagaccaaa

SEQ ID NO: 15850 - DNA, 201 bp, Homo sapiens
tcactgtaactaggaagcagaatataggcccagtagaaatacacacatgcatgcacattgaaataagacaagaaagatacctaaataacaagctggtgctwcaaaaatgaagaaaaatactagcaccaaatggaacaaacacattttgaagtgatagattctcatggtatgtctacccaaagaccaaacagcactcctgca

SEQ ID NO: 15851 - DNA, 201 bp, Homo sapiens
aaagaataatgtttccagagcatttaccttttcaggagcaaaaggacagcatttgctgtgcttgagtctaagccagttgtaggctcatccaagaacaagakggaaggatcagtgataagctccattcctatactagtcctttttctttctcctccagacacaccacggataaactgagttccaacctaaatcacaaatatt

SEQ ID NO: 15852 - DNA, 201 bp, Homo sapiens
gaaaaccggcacaagacaaggacgcactctctcaccactcctattcaacataatattggaagttctggccagggcaatcaggcaagagaaagaaataaagygtattcaaataggaagagaggaagtcaaattgtctctgtttgcagatgacatgattgtatatttagataagccccttgtctcagcccaaaatctctgaag

SEQ ID NO: 15853 - DNA, 201 bp, Homo sapiens
ttatgtagccagcaaacatatgaaaaaaacttcatcatcactggtcattagagaaatgcaaatcaaaaccacaataagataccatctcatgccagttagartagcgatgattaaaaagtcaggaaacaacagatgctggagaggatgtggagaaataagaatgcttttacactgttgatgggagtgtaaattagttcaacc

SEQ ID NO: 15854 - DNA, 201 bp, Homo sapiens
tatgtagccagcaaacatatgaaaaaaacttcatcatcactggtcattagagaaatgcaaatcaaaaccacaataagataccatctcatgccagttagaayagcgatgattaaaaagtcaggaaacaacagatgctggagaggatgtggagaaataagaatgcttttacactgttgatgggagtgtaaattagttcaacca

SEQ ID NO: 15855 - DNA, 201 bp, Homo sapiens
attagagaaatgcaaatcaaaaccacaataagataccatctcatgccagttagaatagcgatgattaaaaagtcaggaaacaacagatgctggagaggatktggagaaataagaatgcttttacactgttgatgggagtgtaaattagttcaaccattgtgcaagacagtgtggtgattcctcaaggatctagaaccagaa

SEQ ID NO: 15856 - DNA, 201 bp, Homo sapiens
ttagagaaatgcaaatcaaaaccacaataagataccatctcatgccagttagaatagcgatgattaaaaagtcaggaaacaacagatgctggagaggatgkggagaaataagaatgcttttacactgttgatgggagtgtaaattagttcaaccattgtgcaagacagtgtggtgattcctcaaggatctagaaccagaaa

SEQ ID NO: 15857 - DNA, 201 bp, Homo sapiens
gaaagcatgtgtctgtatatctgtgcaaagacttgtacaaaaatgttcatagccagtttcttggaaatagccaaaacctgtgaggttcactgtaggtaaaytaaaaagctgtctttttacaagttcatgtacatacttgatattcgataatatttctttctcaactggttttcgacaaggtagaaagccactcttcagttt

SEQ ID NO: 15858 - DNA, 201 bp, Homo sapiens
catgtacatacttgatattcgataatatttctttctcaactggttttcgacaaggtagaaagccactcttcagttttactcgatagcagatgttatgaaarcttaacacagctccttcagtaaatgccttcaggtcattggaagctgtcgcggggaagccattggtgtttccttgtgacactgggataaaaacttcgacat

SEQ ID NO: 15859 - DNA, 201 bp, Homo sapiens
ataatttccttaattaataagtatatttaaattctagggagatttaaagttaggtacgaaaatcattaagtaaatcaaaccaaaagttgagcaaaaatttraaacaaaaaagaatattaaatgtatcaataaaatgtgaactatttcattaaacaaattacaaaaggcctcaaaaaagatttatttgagtaagaccttaag

SEQ ID NO: 15860 - DNA, 201 bp, Homo sapiens
tgataatctgcattacagataccgtatttctcaatttttttactctttatcaaactcttaattgtatagaacactctttacaattggaaagctcaaattgygcaactcaaaacaacattttcatacaatgaaaactgagaagaggaaaaaaaaaaaagtgcacaggtagagcctaaagtcttcagcctgccacctgcccag

SEQ ID NO: 15861 - DNA, 201 bp, Homo sapiens
tagaaattaaactggcaatagacaggttaatatgaccaaaaaaaaaaagtttccttacataagtaaggtgggagtttcataaacaaatcagagtctaggayaaatccatatgactgaggcttttttttttcttttttcaagacagagtctcactctgttgccgaggacgtagtgcagtggtgtggatcttggctcactgca

SEQ ID NO: 15862 - DNA, 201 bp, Homo sapiens
cctgttaatttttatagcaaatttagccaggcgtggtggtccacacctgtgatcccacctactggggaggctgaggtgggaggatcccttgagggtccatsagacggaggctgcagtgaatcgtgattgtgccactggaatccagcctaagcaacagcgtaaccctgtcaaaaagaaagaaaagcaaagaaaaaggagaaa

SEQ ID NO: 15863 - DNA, 201 bp, Homo sapiens
agtgaatcgtgattgtgccactggaatccagcctaagcaacagcgtaaccctgtcaaaaagaaagaaaagcaaagaaaaaggagaaagaaggaaggaaggraggaaggaaggaagaaggaaggaagggagggaggaagggagggagggagggaacaggagaaagaaaggaaggaaaaagaaagaaagaagaaagagaaaga

SEQ ID NO: 15864 - DNA, 201 bp, Homo sapiens
aatcgtgattgtgccactggaatccagcctaagcaacagcgtaaccctgtcaaaaagaaagaaaagcaaagaaaaaggagaaagaaggaaggaaggaaggraggaaggaagaaggaaggaagggagggaggaagggagggagggagggaacaggagaaagaaaggaaggaaaaagaaagaaagaagaaagagaaagaaaag

SEQ ID NO: 15865 - DNA, 201 bp, Homo sapiens
aaaggagaaagaaggaaggaaggaaggaaggaaggaagaaggaaggaagggagggaggaagggagggagggagggaacaggagaaagaaaggaaggaaaargaaagaaagaagaaagagaaagaaaaggaaagaaagaaagaaagaaagaaagaaagaaaagaaaggtaaaggaaaggaaaggaaaagaaaagaaaagaaa

SEQ ID NO: 15866 - DNA, 201 bp, Homo sapiens
aagatcacgccactatactcccgtctgggtgagagcaagatcctttctctaaaatataaaaataaataaataaataaaagaattctgtccaaattggtttyaatctgtgattagaaagccaaaacttcagtctagaaaatcgtcaaatcataaatgaaattagaccaagtgcaatttacatgcgtgttacatcccaaattt

SEQ ID NO: 15867 - DNA, 201 bp, Homo sapiens
gggcaacagaggtggtcacggaaggcctttccagtgaggccctcaagcagagctctgagggtggccttctggaggagcagtatatgtccaagtgctggtcraaggaacagcaaagaggccagtgaggctgaagcagagtgagggaggataagagagcaggaactcgggttgtatctaccactgaccacaggaaggactttg

SEQ ID NO: 15868 - DNA, 201 bp, Homo sapiens
gtggtcacggaaggcctttccagtgaggccctcaagcagagctctgagggtggccttctggaggagcagtatatgtccaagtgctggtcgaaggaacagcwaagaggccagtgaggctgaagcagagtgagggaggataagagagcaggaactcgggttgtatctaccactgaccacaggaaggactttggctttgatctg

SEQ ID NO: 15869 - DNA, 201 bp, Homo sapiens
gtcacggaaggcctttccagtgaggccctcaagcagagctctgagggtggccttctggaggagcagtatatgtccaagtgctggtcgaaggaacagcaaasaggccagtgaggctgaagcagagtgagggaggataagagagcaggaactcgggttgtatctaccactgaccacaggaaggactttggctttgatctgaat

SEQ ID NO: 15870 - DNA, 201 bp, Homo sapiens
gaggccctcaagcagagctctgagggtggccttctggaggagcagtatatgtccaagtgctggtcgaaggaacagcaaagaggccagtgaggctgaagcasagtgagggaggataagagagcaggaactcgggttgtatctaccactgaccacaggaaggactttggctttgatctgaatggcactggaaggcacaggaaa

SEQ ID NO: 15871 - DNA, 201 bp, Homo sapiens
gggtggccttctggaggagcagtatatgtccaagtgctggtcgaaggaacagcaaagaggccagtgaggctgaagcagagtgagggaggataagagagcakgaactcgggttgtatctaccactgaccacaggaaggactttggctttgatctgaatggcactggaaggcacaggaaagttctgagtgaagaaatgatatc

SEQ ID NO: 15872 - DNA, 201 bp, Homo sapiens
gagaaggaatttcacaaggtaatgtcatcagttaaggcaggaacaggccattttcagttcttttgtggtggaatgtcatcagttaaggcaggaaccaaccwtctggatgtatatgtgcaggtcacaggggatatgatggcttagcttgggctcagaggcctgacattcctgtcttcttatattaataagaaaaataaaaca

SEQ ID NO: 15873 - DNA, 201 bp, Homo sapiens
agaaggaatttcacaaggtaatgtcatcagttaaggcaggaacaggccattttcagttcttttgtggtggaatgtcatcagttaaggcaggaaccaaccawctggatgtatatgtgcaggtcacaggggatatgatggcttagcttgggctcagaggcctgacattcctgtcttcttatattaataagaaaaataaaacaa

SEQ ID NO: 15874 - DNA, 201 bp, Homo sapiens
gtttggggatagcaccaggagatatcagctgtggtggcttggagaaacagtgtaaaccggcagtgtaaacaagagcagggcatgtatgagtagttgagaayggtgaataggagtatgactagacagaagatagtagggatgacaagtttttgggggcgcagtccaagttggtctggtgtctggaatgagactggggcctaa

SEQ ID NO: 15875 - DNA, 201 bp, Homo sapiens
gaggcagcgctttaacaattaaggatgtaaatgttgggatgagtcacccggaccttccaaacaaactctaaagcagcagtttccacttaacaagaccaccwagcatgtgcacggtgcgttcctaaatcctacccagttcctccacaggctgcctccttgccgcgtctctcaatctcagtgggagtggcgggcactgcctct

SEQ ID NO: 15876 - DNA, 201 bp, Homo sapiens
aacaattaaggatgtaaatgttgggatgagtcacccggaccttccaaacaaactctaaagcagcagtttccacttaacaagaccaccaagcatgtgcacgktgcgttcctaaatcctacccagttcctccacaggctgcctccttgccgcgtctctcaatctcagtgggagtggcgggcactgcctcttccctcctgcgcg

SEQ ID NO: 15877 - DNA, 201 bp, Homo sapiens
attaaggatgtaaatgttgggatgagtcacccggaccttccaaacaaactctaaagcagcagtttccacttaacaagaccaccaagcatgtgcacggtgcrttcctaaatcctacccagttcctccacaggctgcctccttgccgcgtctctcaatctcagtgggagtggcgggcactgcctcttccctcctgcgcgcccg

SEQ ID NO: 15878 - DNA, 201 bp, Homo sapiens
gaccttccaaacaaactctaaagcagcagtttccacttaacaagaccaccaagcatgtgcacggtgcgttcctaaatcctacccagttcctccacaggctkcctccttgccgcgtctctcaatctcagtgggagtggcgggcactgcctcttccctcctgcgcgcccggaaccttttgagtgggcacagcacgcagcccgc

SEQ ID NO: 15879 - DNA, 201 bp, Homo sapiens
tacctcagcctcctgagtagctgggattacaagcacttgccaccatgcctggtaatttttgtatttttagtagagacagggttttgccatgttggccaggytggtctcgaactcttgacctcaggtgatccaccacctcggcctcccaaagtactaggattacaggcgtgagctacggctcccagcccatcttgaattgta

SEQ ID NO: 15880 - DNA, 201 bp, Homo sapiens
tatgtgaaaacggggtttttttctcaacttattcaagtgtttcttgtttttttagaggataaatcgattgatagggagtattccaagttaatttaaaaacwacaacacatgactatgcggcctttgatttcatgatgtcttccaaatgcatgaggcagtggaagtgccaggatcttggcagggaaatgtttactttctttg

SEQ ID NO: 15881 - DNA, 201 bp, Homo sapiens
attgcttattgtgcaaatttaacactaatattttgagaaactaatattagaatgaaaaaaagtcatccactctccaaccaccctcggtctccaatgttgtrtctgtccatgtaactgcataaagttctcttataacacttatgtgccattatgtataattacagacaatttctgagttcctgagatgaagagctacaggca

SEQ ID NO: 15882 - DNA, 201 bp, Homo sapiens
cccactgcctttagatcctgtgatatattctgtgctgggttaagacatggcatctacacagcacacaaaccatcaattactagcaagtctggaaataatcyagatacctcagccctcagggaaagtaaaaacaacaatgacatcactctggtaaactgctgtttaataacactctcatcgtagagtaacactatctgattc

SEQ ID NO: 15883 - DNA, 201 bp, Homo sapiens
tttttttttttgagacagtctcgcactgttgccctggctggagtgcaatggcgcgatctcggctcactgtaacctccagctcccaggttcaagcaactctyctgcctcagcctcccaagcaactgggattacatgcgcccaccaccaagcccagctaattttttgtacttttagtagacacagggtttcactatgttggcc

SEQ ID NO: 15884 - DNA, 201 bp, Homo sapiens
taatttctttattatttatcataactgtcttcctcaaaaaattagctccatgagcagagttttatttttgcccattttgttcactactgaattcacatccytaaagcacagcacaggccctataagaacaagttgaatgaatcagtgaacaaaagtgaacagctaccagaaaaccccaaaactggctgacacttctttcac

SEQ ID NO: 15885 - DNA, 201 bp, Homo sapiens
ggaaaacaaagagaactcactttcagagggtgagggaggtaaggctagagaagacagaatctaatgacttttccttaactttctttctctcttcttcccaygtaattttaccctttctttttatatattcagtctctctctctctctgtctctctctctctctctctctctctatatatatatatatatatatatataatt

SEQ ID NO: 15886 - DNA, 201 bp, Homo sapiens
cagcctatcacacaatatttcggcaattctttgtctctgggccaaaaaaaaaaaaaaaaagaaagaaaagaaaacactccaagccaaccttggatttgcarggcattttgcattagtgcttggtccttacctatcataattcatgagacctgaaatagctatcagtatgctctggtgcttaacagtacttcctcaaaaatc

SEQ ID NO: 15887 - DNA, 201 bp, Homo sapiens
atgaaaaaggtgtgaaataaaaaggtctactcagaaaactacaaaatgttcagtgttatagagcagagagagggagaaaaaatgtgtatgtgtgtgtctgytggtgttgagtaaagaagctaaagagacagcagcaaaacaggcccaacccccctacaccctcatcacagacatccttccctacattcttacctgctttgt

SEQ ID NO: 15888 - DNA, 201 bp, Homo sapiens
acctcaatagcaatggaacaaagtcccttggaggaagagtgactaaaaggaggaagagaaaaagaggaagaagaaaagttagtgcagacacggaatgagaygtgacttaaaccatgaggtgggggaggagcataaggaaaggccaggtgatgaacactttcacgtacaacaccacattgcctcacttcaggtgcagaattc

SEQ ID NO: 15889 - DNA, 201 bp, Homo sapiens
taaaccatgaggtgggggaggagcataaggaaaggccaggtgatgaacactttcacgtacaacaccacattgcctcacttcaggtgcagaattcaaccaaygtgaagattttttttccaggttaatttccacgttcatattatgtaacaagccacttttctcattgttatggaaagcaaccatttttgaccatacacatta

SEQ ID NO: 15890 - DNA, 201 bp, Homo sapiens
ctttccttgcagctaagacatctaataacctataagaggacatatatgttgtgggtctaataacctataagagaatatatatgttgtggggtttttttccytccaacacatgctatatatctcatggctactttgaatccaaattctactttagttagaaaattaactggtcaagaaattctatggtttaactaaaattat

SEQ ID NO: 15891 - DNA, 201 bp, Homo sapiens
tatatcattttcttccttgttaagagtcagataaatacactggaaaattccaagtttagaaggagaagacatcactttggtagggtcatcctttaagaatrtgaagacgtggtacatacataagcacgtttcaaacaaagtggatgtctgagggtagtgaatattcagatagagaaggaaggtggaaaaaattatggcagt

SEQ ID NO: 15892 - DNA, 201 bp, Homo sapiens
tggcctgcccaccccaccctccacccttctatcatccctgaaactgcattccccacccttatttattgctttacagcatttgcatgcaggtcagtgtccckcactataaaagtctgtcaacaagaacagcatgccacattgctaccacctctcacaccctcctgcccatgacatacagcacagttgttgtaaaccactgaa

SEQ ID NO: 15893 - DNA, 201 bp, Homo sapiens
gtcttgttttgtttatggacaagagaggtcaatgctcacctccctcccaccctcccatccctacacacacaaaatcttcactttctcaatcaccacgcccrggccctccaatttagggttggggctcccattgggtcttctaatcaatccttttatcagcgtgaaagtgtgttctgaatcccccactaggctttaaggctt

SEQ ID NO: 15894 - DNA, 201 bp, Homo sapiens
gtcattggaagctgtcgcggggaagccattggtgtttccttgtgacactgggataaaaacttcgacattactggaagacatctggagagtttttatctttmtgcagacagaaaagcaatagtaagttgatagtccagataaatgagattgcaaacactaggtgacaatacatttaaaacaagtccatttttaaatgtgtgg

SEQ ID NO: 15895 - DNA, 201 bp, Homo sapiens
tattaaatgtatcaataaaatgtgaactatttcattaaacaaattacaaaaggcctcaaaaaagatttatttgagtaagaccttaagatgagcttaacaayttgtgaaacaggtttgaaatgttaacttcaataaatgtagttttaatttttaaaagtcaaagtaatccatgacgaactttctctctgcctatgattgagt

SEQ ID NO: 15896 - DNA, 201 bp, Homo sapiens
acaacttgtgaaacaggtttgaaatgttaacttcaataaatgtagttttaatttttaaaagtcaaagtaatccatgacgaactttctctctgcctatgatkgagttgctgttcccaaacagtcctcctaagcacaacgacaaaagtagaccaaaaaaagtaagaagaaactgttgaagagttctgtctgataaaagcaacc

SEQ ID NO: 15897 - DNA, 201 bp, Homo sapiens
attaactaaagaataatgtttccagagcatttaccttttcaggagcaaaaggacagcatttgctgtgcttgagtctaagccagttgtaggctcatccaagracaagatggaaggatcagtgataagctccattcctatactagtcctttttctttctcctccagacacaccacggataaactgagttccaacctaaatcac

SEQ ID NO: 15898 - DNA, 201 bp, Homo sapiens
taagaaatggtcactgtaactaggaagcagaatataggcccagtagaaatacacacatgcatgcacattgaaataagacaagaaagatacctaaataacargctggtgctacaaaaatgaagaaaaatactagcaccaaatggaacaaacacattttgaagtgatagattctcatggtatgtctacccaaagaccaaacag

SEQ ID NO: 15899 - DNA, 201 bp, Homo sapiens
aatatatattaaataaatacatatatatatatttaatcattttatgtatctctaagagattaaatatgtttaatcattctatatatctctaagtgtgtgtrtgtatatatatatacatatatagagagagacagggagagatagatagatagatagatagatagatagatagatagatagatagatagacagatagaaaac

SEQ ID NO: 15900 - DNA, 201 bp, Homo sapiens
tctcattaaagaagcagggatgggtaatatatattaaataaatacatatatatatatttaatcattttatgtatctctaagagattaaatatgtttaatcrttctatatatctctaagtgtgtgtatgtatatatatatacatatatagagagagacagggagagatagatagatagatagatagatagatagatagatag

SEQ ID NO: 15901 - DNA, 201 bp, Homo sapiens
cgtctttctctcattaaagaagcagggatgggtaatatatattaaataaatacatatatatatatttaatcattttatgtatctctaagagattaaatatrtttaatcattctatatatctctaagtgtgtgtatgtatatatatatacatatatagagagagacagggagagatagatagatagatagatagatagatag

SEQ ID NO: 15902 - DNA, 201 bp, Homo sapiens
ttttctatcacggtggctttttttaccctataagacagaatcttttttccaacatattttcaattttacatttccagtatagcattaatacatttgtcatwtattaaataatggcaaaccatagcatcataaagtattaagactgaagggctactaacctacctattcattttaaagatgaggaaacaaatgccagagaca

SEQ ID NO: 15903 - DNA, 201 bp, Homo sapiens
tcattaccactccaagttaagaaaataacagtggaagagaggctatgtgcacagtattcccccacagcccagctcacagctatcagggcctttgactaatwtggcaagagaaagttcagtctataatggtgcaaacagttattgtaaataaaataatggaaacagtttaaaactcttcctaaagatttcagtataaaagga

SEQ ID NO: 15904 - DNA, 201 bp, Homo sapiens
actaaaaaaaagtttccttaattttagtctaattttaaaaatattttagattgtgatgtttcatatttataggtcggtttatttgctaactaaagttacaytgggaggcagtggtaaatcaaataaaaattcaaaataaagttttattagttcctaacctcatcctaatattttatcaaattctatttgataagttcagat

SEQ ID NO: 15905 - DNA, 201 bp, Homo sapiens
ccgagatcccaccactgcactccagcctgggccacagagtgagactctgtctcaagaaaaaaaaaaaaattaagataaagttttcagacctggccgttaaygactgtttgcaaaaactgaaaaatctccgaaaaataaattttattttaattttctttttagctcacccagataagtgaaaagaataaaattttatgatac

SEQ ID NO: 15906 - DNA, 201 bp, Homo sapiens
agatctcatcaagatctatacaatccagtcaaagctgtactctgaaagcactgttttgtaaagaatatcaataaaaaacatctcttccttactactctggygtatttatttatgactagctgacattcaaatgataagagagctgtaagatcctcctaaaaaccaagctttaggggatatctctaggactgagaagggagt

SEQ ID NO: 15907 - DNA, 201 bp, Homo sapiens
gccaagtgtggtgctacgtacctgtaatcccagctacttggtaggctgaggcacaagaatcgcttgagcctgggaggcggagggtgcagtgagccgagatsgtgccactgcactccagcctgggcgacaaagactccgtctcaaaaaaaaaaaaaaaaaaaaaagaaggaaaaagaaaaagcaagtgtatgtcaaagtggc

SEQ ID NO: 15908 - DNA, 201 bp, Homo sapiens
accccaagggacccctgtagatggaaaagaagaaaggagaagagaaaaagctgttctagtaaaggaatgcaaaatccttaatcgaaagagatatgttgggwcatgtataccattcatgaggctggagtttagttttcagaggggggcagtaacaaaatgaggctaaaaaggtaagcaaagaccatcaaaagggtgcagcgt

SEQ ID NO: 15909 - DNA, 201 bp, Homo sapiens
ggaagaatgccaaacccatgtatacagagggctgactctgcctatacactggttccacagggctgcttgtgggacttgagtatgcagggatttgggtataygcacccaaagggaccactgtaccccaagggacccctgtagatggaaaagaagaaaggagaagagaaaaagctgttctagtaaaggaatgcaaaatcctta

SEQ ID NO: 15910 - DNA, 201 bp, Homo sapiens
gagaaagaaaaggaaagaaagaaagaaagaaagaaagaaagaaaagaaaggtaaaggaaaggaaaggaaaagaaaagaaaagaaaaaagaagagagaaaargaaggaaagaaagtaaaaaagaaaactaaaagaatccattgaactcttccaggcaccctcacaggcttccctatgaaagtcccaaagagcctggcactat

SEQ ID NO: 15911 - DNA, 201 bp, Homo sapiens
aaagcctgcttgtatggtggtttcagagttaaactggctaggtgctctaggaccccacatcatggcagcacagtgatctggagaacgcggcctaattcccracagacaggaagagaccccatcaccaaagggctgtatggtcagtgagaagccactgaggccttttaatcaggaaaggctcacaaccctaatgatgtttat

SEQ ID NO: 15912 - DNA, 201 bp, Homo sapiens
ccctacaacaaaaatcaacctcccacctgttgccgtttccttatttgcagattacctgctaaggctaatccatttctttttctctttctgtgtcctagacmccctgcaaagccttaagtgaaaggaagccttcaaatggctttacactttacctgatcccagccgattcatgttatttggcctgattatgtatcttagcca

SEQ ID NO: 15913 - DNA, 201 bp, Homo sapiens
tgccatccccatttgatgttccttcagccactgaggaaaagacttcttaagagtatcaaataacttattgcttgaatttaaatagctcactgactcaagayggaaattttaaagacacttttgtgaggtttccacaaataaaaggcaacaactagagctaaagtacccaagaaagagtgatcacccatgcccatacaagac

SEQ ID NO: 15914 - DNA, 201 bp, Homo sapiens
actagcaatcacttcttctactgccatccccatttgatgttccttcagccactgaggaaaagacttcttaagagtatcaaataacttattgcttgaatttmaatagctcactgactcaagacggaaattttaaagacacttttgtgaggtttccacaaataaaaggcaacaactagagctaaagtacccaagaaagagtga

SEQ ID NO: 15915 - DNA, 201 bp, Homo sapiens
acgcaggaattcgaggccagcctgcacaacatggtgaaaccccatctctatcaaaaatacaaaaaagtagccgagtatgctggtgcacacccatggtttcrgctactcgggaggctgaggcaggaggatcacttgagcccaggaggcagagattgcagtgagccgagatcatgccactgcactctagcctgggtaacagag

SEQ ID NO: 15916 - DNA, 201 bp, Homo sapiens
cagccctgtccttgagttctgcatctgaagattcaaccagtcgcaaatcgaaaatattaaaaaataggacaggcgtggtggttcacacctgtagtcccagmactttgggaggtcaaggcaggcagatcacttgaacgcaggaattcgaggccagcctgcacaacatggtgaaaccccatctctatcaaaaatacaaaaaag

SEQ ID NO: 15917 - DNA, 201 bp, Homo sapiens
atcacggaatggcgggactgaagcactgaaacaaactctgcattccgcgtgccctttcctcttaaggtgggtatttgcacacaaaaattgtacacacctgkggcacagctcagacaaaccaagcaggaagaagctgctagaagaaatgagtcggcttactgaagcctctactatttctgagcagatatttcagcagtctgt

SEQ ID NO: 15918 - DNA, 201 bp, Homo sapiens
ttctgcagacagaaaagcaatagtaagttgatagtccagataaatgagattgcaaacactaggtgacaatacatttaaaacaagtccatttttaaatgtgyggcaatgagcagcttcatttccaatgaatggcccataccattgtgataagaacatcctaaaaacctaaatgggaagacaggcacaacttggaatgcataa

SEQ ID NO: 15919 - DNA, 201 bp, Homo sapiens
aaagggttatgttcctgaaacgtttaaatttaacatcaggccaggtgcagtggctcatgcttataaccccagtgctttgggaggccaaggtgggaggatcrcttaagcccaggagttcaaggccagcctgggcaacgtaggaagaccccatctccacacacagaaaatttttaattagccaggcattgtggcatctagcta

SEQ ID NO: 15920 - DNA, 201 bp, Homo sapiens
taagtacacagtgagtctggaactgctcgctgtgccaagcaaatattcaaagaatgaggcaaggtgggagaaacacttgagcccaggagtttgagatgtgyctgggaaacatagtgaaaccctatctctacaaaaaacttaaaagttagctggaagtggtggcatgtgccggtggtcccagctactcaggaggctgaggtg

SEQ ID NO: 15921 - DNA, 201 bp, Homo sapiens
gagccgagatcacgtcattgtactccagcctgggcaacagagcaagactccgtctcagaaaaaaaaaaaaaagaagaagaaaggagacttcagggtggggyctggcttgttcctttcaaaacacaggtatctatgcccattctctccttagaattgataagtaagttacaatatattccacagagaaagtaatatctattc

SEQ ID NO: 15922 - DNA, 201 bp, Homo sapiens
ttacactatagccattacaatgcaaaaagctcattttcacccaaagcttcaaatatcttctcagcaaatcttccaaacatattaatcaattgtaaagttcrttcattcatgtcatttttttcttcacgatcctctccaacccacaagaggaggagttactttgtctctcttgcccacaattgtatctctagaacctaaaag

SEQ ID NO: 15923 - DNA, 201 bp, Homo sapiens
cagcacttcggaaggctgaggcaggtggatcttgaagtcaggagatcaagaccatcctggctaacacggtgaaaccccgtctctactaaaaatacaaaaarttagctgggcgtggtggcgggcacctgtagtcccagctactcaggagactgaggcaggagaatggtgtgaacctgggaggctgaacttgcagtgagccaa

SEQ ID NO: 15924 - DNA, 201 bp, Homo sapiens
gctgaatcaatcaagcggaagaaaggatataagagattaatgaaataaacttaatgaaataaagcgtgaagacaagattagagaaaaaagaatgaaaaggracaaacaaagccttcaagaaatatgggactatgtgaaaggacaaaacctacgttttattggtgtacctgaaagtgacagggagaatggaaccaagttgga

SEQ ID NO: 15925 - DNA, 201 bp, Homo sapiens
agagcaagactccatctcaaaaaagaaaaaatagaaataaaaaattattagctctgtcattagaaaagtataacaggccaggcacagtggctcactcctgyaatcccagtattttgcagggcagaggcaggaggatcatgcgaggccaggaattcaagaccagcctgagcaacgaaacgagaccctgtctctataaaaata

SEQ ID NO: 15926 - DNA, 201 bp, Homo sapiens
ctgtctaaggaaggtaaatgacaaggaacagcactttgcacacaggctcttcccttggagtggccagcacatactccctttcaggtgtattcagtgacagyaggtgaaggtttccctgatcacctgattccaactgcaaatcaaccttcttctccctacttctctctcttcctcccctttctccaccccttctctgcttaa

SEQ ID NO: 15927 - DNA, 201 bp, Homo sapiens
atatggttcaactagggatacaagctcttagataaatttatatatatacttaactagcagtatggctatacatacatatatgtggctatacatatatacayatatatacataattagcagtatggcttaactagggatacaagctcttagatatattttatatatacttaagtatagaaattatgatgcacaagtttaaac

SEQ ID NO: 15928 - DNA, 201 bp, Homo sapiens
cacagtggctcacatctgtaatcccagcactgtgggggactgaagcgggtggacccacctgaggtcaggagttcgaagccagcctggccaacatggtgcgrccctgtctatactaaaaatacaaaaattagctgggcatggtggcgggcacccgtagtcccagctactcgggaggctgaggcaggagaattgcttgaaccc

SEQ ID NO: 15929 - DNA, 201 bp, Homo sapiens
atcttcaaagttaaaaaaacaaaatctcaatactgcaacagtctaatggtatcaagatttaaagtaactgatcaaggacacttttggcatgaagcaaaccraactgcaaaaacagtaccatgatctgtgataactagtttgtgaagaacctagtctggaaagaacattattccaatgtttctacttatgagctgtctttta

SEQ ID NO: 15930 - DNA, 201 bp, Homo sapiens
atggcacctataaccagtcccagtacgactgtgacaatgatcttttcaaaaagaaaaatgcaaaaaaaggggaagagtttcaattagagataaaaacttawacacaccatttattagtataatatatggttacataatcagatctctccattaagataaacactcaatggcttggccaacgtccctgggagaaaataaaac

SEQ ID NO: 15931 - DNA, 201 bp, Homo sapiens
attgctgccaggggttaggagaggcagatatgagatgggaagttattgcttaatgggtacagatattccacttgagaagacaaaaagaattctagagttgsatggtggtgatagttgcataacaatgtaaatgtacttaatgccactgaactgtacatttaaaaataattgggccaggtggagtggctcacgcctgtaatc

SEQ ID NO: 15932 - DNA, 201 bp, Homo sapiens
ttccattgtttcagattccacattaagtgagattatgtgacatttctgtgcttagctttctgcgtttggcttatttcacttggcataatattctccaattmcatccatgttgttgcaaatgacaaaatttcttttgtttttccactgtgtatatataccacattttctttatcaaatcagacccttcgggtgattccgtat

SEQ ID NO: 15933 - DNA, 201 bp, Homo sapiens
tggcatattatggttgtatatatttgtggggtaccaagttatataattcatgaatcataagtgtgaaataattaaatcaagctaattaacacatccatcgyctcaaacatttattttttgtggtaaaagtatcttaaattttagcaattctgaaatttacattattatttactgtgttcaccacattgtgcaatgtatctc

SEQ ID NO: 15934 - DNA, 201 bp, Homo sapiens
ggcatgatcataaactcactgcaactgagttgaactcctggcctcaagcaatcctcccagcttggcctcccaaagtgctgcagttacaaatgtaagccacrgtgcccagccagagcagttttaaaagtatgtacatataattaaaatgagtgaaaaatagccaggcctggtagacatgcagttatctcactttctgtacac

SEQ ID NO: 15935 - DNA, 201 bp, Homo sapiens
ctacttgggaggctgagggaggagaatcgcttgaacccgggaggtagagattgcagtgagccaagattgcaccattgcactccagcctgggagacagagcragcgagactctatgtcaaaaaaaaaaaaaaaagctaggcatgtcagttactcaggaggccgaggtgggaggactgcgtaagccccgcaggtcaaggcagc

SEQ ID NO: 15936 - DNA, 201 bp, Homo sapiens
tattccagtagatggccttaagtaaagcagagccccatttacagaatcctcaaaacaggttttacatgacaagtgaatgtgcaggaagaaatgaaggaaaraaacaattccttatcagagcaaacacagttcagactcaccatcataaacacaaaacagatggtcatgagaagtgttgctacagaaaccacactctgacct

SEQ ID NO: 15937 - DNA, 201 bp, Homo sapiens
tatcgtggaatgctgaagtactgaagccatgacagccaagatgcaatggttgtgagattgaccaacagacctgaaaaaatctacaaaaagcaaatactaaragtcaggcctgcttgagtaatttcatgcagaattctagagaataccctcttcaagtccctaccactttgtaagtatttcttttaaaaccaactctttctt

SEQ ID NO: 15938 - DNA, 200 bp, Homo sapiens
ttcctccttctctccccaattttgtaactccataaacattctaattaaaatgatacagtggtgctcaatgagtattgttaatttacagtgacaatctttcttcttgtttgttttcattagaaccagttgtaattcttggatgttagaagcttggttatactatattaagacacagatagtttactttggagttaatgagc

SEQ ID NO: 15939 - DNA, 201 bp, Homo sapiens
ttaatagttattaaatcctaagtaaaattttcagaacttggaaattaccaaatccaggagtggtcagattcctttatgaaggtagatctggagctacttargccagatttttgtattttagcaaagttcctcagatgattctgacgcacacctggattataaaccactaaaccactgaactaccccaagaaggttacgtga

SEQ ID NO: 15940 - DNA, 201 bp, Homo sapiens
ggaaatacatcaagtgtcatttcaaaaataacccaggggtaaggaaggaagtagtgactgggagaatggctgagtaggcttttgtgtgctacaatcttctrtttcttgacctgaattgatggttgcacatgtgtgttcattttaattcactgaactatattttttggtacattacccttcaactaaaaaaataaaattaaa

SEQ ID NO: 15941 - DNA, 201 bp, Homo sapiens
aataagacaagaaagatacctaaataacaagctggtgctacaaaaatgaagaaaaatactagcaccaaatggaacaaacacattttgaagtgatagattcycatggtatgtctacccaaagaccaaacagcactcctgcagaccccctttgctctccttcaggattctattaatgaagcattttacagcataaaaaagtca

SEQ ID NO: 15942 - DNA, 201 bp, Homo sapiens
aatattaccatagtttaaatgttattctttacactcctgtgactgacatacttctgtgcaatattccgatggtgtggaaaggctagaaagtgattgcgcaygttcaggaaacgggccatcaggctttgtgagtgagtgtagccatcccaacatctacctgctgcatctaccctaggaaattagtacctgcatgcagatatt

SEQ ID NO: 15943 - DNA, 201 bp, Homo sapiens
aacaaaaatacgtatcatacatccaagattagtttaagaagccacagggcaggctagacttgtctgttacagacctctgctgacagcaggggttgaacaarccagcttcccacatcctcagggctagacccactatgcatgcccatgaataccttgggtgccagcctccctgagaaagcatcccatgaagctctgcgcaca

SEQ ID NO: 15944 - DNA, 201 bp, Homo sapiens
caaatctagaaaaactcttttctctggatatcaggtcccaaaggctcaggattttcttccctacctctggctgctttttctcaatgaatattggtaacccytatacatattttcaaaacatcatgttgtatatgatcaatatatacaatttttattcatcaatttaaaaataaattttaaaaagtactggtaatcctccgg

SEQ ID NO: 15945 - DNA, 201 bp, Homo sapiens
agggtgggacactgctatctcctgcattgtcttggtgaaggtgagctggagcaactattcaggttagcttgacacacaaatccctatggatgtcatagacrttgttgcgttggtcttaaatcccaattctgtgtttaccaaggaaccctctgatctcagtttcacacctgagacaataatgtaacaagataatgtccacat

SEQ ID NO: 15946 - DNA, 201 bp, Homo sapiens
taagtcgctaatttgtggaataccggtagaagtattctcactgctaaaatctaatcagcccaagaaacatctaagtagaaatcgaggctgggataaagcayttcaggataaaaagaaaacatgaccgaaagaaaaaaaaagccttaatccatttagaaaagtaaaagatatatcctcaagatatatcattttcttccttgt

SEQ ID NO: 15947 - DNA, 201 bp, Homo sapiens
tgtgtacatacaagatattcttctagggcatgggagagttgagaacaaaacaaacaaacaaacgaaaaacaaagtctgagcccttgtggagtttacattcyagtccagggatcagcagttttcttagacaaagggttgttggaacagggccgtgctcattcccttacatattacctagggctgctttcatgctacaccaca

SEQ ID NO: 15948 - DNA, 201 bp, Homo sapiens
caccaatatggagcaatacacttactctaagaaaaaaaacatagtaaggattaaataaataaaatataccaactcagcaccagactcatctcaaagtgccygatctctaatgaatatagtattctgggtttagggaactctctaaaagtaacaactacctttaagcaaacaccagtctttccccatggtcagaagctttct

SEQ ID NO: 15949 - DNA, 201 bp, Homo sapiens
aaagtaatatctattccaaatggaaggtcaaagccaaagactatttcattctcaaataatgattagcacagaggccaatcctatgatcctatacaattatragtgataagcaactgcaccacagtgcttaaacccaagactccctgagcatttactgcctgttgtacttgaactatcacaattgtacaatggctggtgggt

SEQ ID NO: 15950 - DNA, 201 bp, Homo sapiens
aaaatcaccataagcttgttattcactaaggctccactgtcagaaaagctttccaggtttctaaaatacctactcaaataaagaccaagcaatcctaaatrattaacccaaacctcaacatgaatgttctaagacaaagagcttggcttactactttgggatgaaaccctggcattacagaaaacaacaacaatgtccagt

SEQ ID NO: 15951 - DNA, 201 bp, Homo sapiens
taagataaatgacagcagcccttcctctacctccagaaactgtatttagagttggagccagcagataggagaaagactggaaatactacagccaaaaaggyctttctcatggatacttaaacaggaaatgccagcagcaaaaacaccaacccctgatgacctttccactaaaatgtgaaagaattgcaagatctgactgca

SEQ ID NO: 15952 - DNA, 201 bp, Homo sapiens
tattgtgcctgaaattccagctgtgaggctgaggcaggaggatctcttgagcacaggagatcagcttgggcaacatgacaagaccctgtctcaaaaaaacktacctaaactctctagcaatatataccagtatttagataacagctttaacaattcagcattaaaacgttctgcaagcttgggtcacagagcatgaacttt

SEQ ID NO: 15953 - DNA, 201 bp, Homo sapiens
ttgctaccacctctcacaccctcctgcccatgacatacagcacagttgttgtaaaccactgaacatgaacctggaacacagggaataaaatttaccccaamatttcctgtcacctctattacattttagtggataatgattaatcccttggtcttgttttgtttatggacaagagaggtcaatgctcacctccctcccacc

SEQ ID NO: 15954 - DNA, 201 bp, Homo sapiens
taggaaaaagctaattaaaatttgtgtgagtcagttattaacacagtaagtcattaggtaacagaatctaattttaacccattttttgaggctgccttttwtctttatttagcaatgaatgaagttacttgattaggttcaatgactggcccagggtcaatcacacagtaaattaaaatagcaaaagaagacgtcttccta

SEQ ID NO: 15955 - DNA, 201 bp, Homo sapiens
gacaaaaaaccaaacaccgcatgttctcactcataggtgggaattgaacaatgagaacacttggatacaggaaggggaacataacacaccggggcctgttktggggtggggagagtggggagggatagcattaggagatatacctaatgctacatgacgagttaatgggtgcagcacaccaacatgacacatgtatacata

SEQ ID NO: 15956 - DNA, 201 bp, Homo sapiens
acattaatgaaaatacataactaaatataaaagcaagagagaaagaaaaaaaggaaggacagaaagaagaaagaaagaaagagagagagagagagaaagamagagaaagaaagaaaggaaaagaaagaaggataaaaagaaaaacagatgcataattctgaaatcacaactgtgatgagtgctacaaaggaaaggtaaata

SEQ ID NO: 15957 - DNA, 201 bp, Homo sapiens
acaatgtattgtcattctcttggtctgactgctgggagatcacagggagctgagtgccgctgagttaaacagatgttcagcatggctgcatcttcaaagtyttgtctggttccagccctgacgaaacttctagggccctgagagaaagagaaagtttctagttgaagtaatatcctatagtttgttagtggaaacagaagc

SEQ ID NO: 15958 - DNA, 201 bp, Homo sapiens
tgttgtggctttgtatttattcctgagtgtcttttccttcttccaggctaacctccaagtggattaggatcatgttagtgacttccagggcagataccttkctcacagtaggtgcccatcaaacctttgttgaaaaaatgacatttattgactataatctagaaagagcaaaagcaattattttgtgtgtcacaattacta

SEQ ID NO: 15959 - DNA, 201 bp, Homo sapiens
cctagtccctatctgtaggtaagagaaaatgtggaaagtcgatgtttgctctggaagttatagaaatttccactcagaaggtccttctttctgaagaaatktttgtttttttttaattcaggtccaatttggacaagatactcttgctttttcgagtcagttgaagagcaagataacaggtgaaaagtatttcaagagttt

SEQ ID NO: 15960 - DNA, 201 bp, Homo sapiens
ggtctgctcaggccaagaggcagaaactgaactgccctcaaatacttggtacccagccaagtgatttttcctgttttcaaccttgacactgcaatctgcgsattgcgtgaataagtggaaattttcgagcaagaaatagcttcatgccagttctatttgaaatgttcaaaccacctatttaatggcatcttcacagccatg

SEQ ID NO: 15961 - DNA, 201 bp, Homo sapiens
taaagcattttgcctacgtcatcttagacttttggtgaagtgatggatttcaaacatataacagttactttctttgatttgttgccaatgaaatttacgaratataaagtggcatccaaagagtgagttttggtaacatatttttggctttccaaagccagggcatttttgtcatgacaccttaagagttatttaactatt

SEQ ID NO: 15962 - DNA, 201 bp, Homo sapiens
ccttgagtaattcacttaatcactacacctcatttttatattttttttgattaatgaacaaagtgaaggtaaagcattttgcctacgtcatcttagacttytggtgaagtgatggatttcaaacatataacagttactttctttgatttgttgccaatgaaatttacgagatataaagtggcatccaaagagtgagttttg

SEQ ID NO: 15963 - DNA, 201 bp, Homo sapiens
gacaattggcttgtatccttgagtaattcacttaatcactacacctcatttttatattttttttgattaatgaacaaagtgaaggtaaagcattttgcctrcgtcatcttagacttttggtgaagtgatggatttcaaacatataacagttactttctttgatttgttgccaatgaaatttacgagatataaagtggcatc

SEQ ID NO: 15964 - DNA, 201 bp, Homo sapiens
tgccacttctgttgcattcccatactatatcattttcagtgcatttgtcctgtgtatgtatatgggaggatttctgagtatatcaaattccccacttaaarctaccattcccacggtatgtgtctccttcacattcattatagaggaattttagtgagttttttgtgtatgtgcatgcggacagaaactgtttagaagggc

SEQ ID NO: 15965 - DNA, 201 bp, Homo sapiens
tcctcctttccctcctcctcctcctgtttttttctggaagagaaaaattatatctaaagctaattgccttaaattcttttttagaaagtgattgtatactrtaaataaactaactcttttcagtaatcgctcatttttttatttttgcagtaaggatagaatgtatgtaagagcatttaggacatataaagcattaaagga

SEQ ID NO: 15966 - DNA, 201 bp, Homo sapiens
ttttttctggaagagaaaaattatatctaaagctaattgccttaaattcttttttagaaagtgattgtatactataaataaactaactcttttcagtaatygctcatttttttatttttgcagtaaggatagaatgtatgtaagagcatttaggacatataaagcattaaaggacatataaagtgcaaaagacattgtcct

SEQ ID NO: 15967 - DNA, 201 bp, Homo sapiens
tgcattgtcctcagagactgcctgaaaattcaaattctgggcctcattaggcacagagtcctaagattgtgtttctgtttttattcaaagagagaaaacaraagtagaaaaagttgaatacccaatcttttataccattgcaggaaggcttaaggaccccaatcgtcagttttcctgcaattggtgacttcaatatgagaa

SEQ ID NO: 15968 - DNA, 201 bp, Homo sapiens
tcaagtaatagcttgaccttggattagttgctttatctcaattttatttctgcaaagtagcgtgaggatccctatcctgctcacctcacaagttgtgaagytcattaggtttattgttgcaatgttttctaaatcttctcattaaatgatgttaaaacctactaagaactcaaacaatcccagacacactgatggagaatt

SEQ ID NO: 15969 - DNA, 201 bp, Homo sapiens
taactattgctgttaacaaagaaaagtttaggagggatagcattaggagatatacctaatgtaaatgttacgagttaatgggtgcagcacaccaacatggyacatgtatacatatgtaacaaacctgcacgttgtgcacatgtaccctagaacttaaagtataataaaaaaaaagaaaaaaaagtttggatacatatacat

SEQ ID NO: 15970 - DNA, 201 bp, Homo sapiens
atacatatgtacatatatacacatacacacacctcatcccccccacacacaaataattggcatacggtgaatatattttaccactaaagctgtactaaacrtaattagatatgtttgggataagtcagaagtattttcgaatcttacagtaacttaattattatatactatagttaatatcctgcagctataaaaatgact

SEQ ID NO: 15971 - DNA, 201 bp, Homo sapiens
gttttgtttttcctgaagggtgacagtagagggtgggaaaggtacattttacataggagatttatatcttaattttactctcaaaatagaagaccctgagaaaatacacatgagcagggaattttttaaaagaaattcagtttaaagtcagctttttctagattgcaagtaagctgtgtagagtaagggaaacatggctca

SEQ ID NO: 15972 - DNA, 201 bp, Homo sapiens
gattgatgttcagtgacttggaaattctctccagggcaaactgcattttcactgcttacttacatacattttgaggcatagattaatttcaaaacaagaayttaaagctaggaggaacctcagacatcagcatagtttgtggttttcaaacttttctctccttttctgtttttaaacattagaacactttattcaatcaaa

SEQ ID NO: 15973 - DNA, 201 bp, Homo sapiens
atttcaaaacaagaatttaaagctaggaggaacctcagacatcagcatagtttgtggttttcaaacttttctctccttttctgtttttaaacattagaacmctttattcaatcaaaatcttccatgaaatcccattgtataaaataaataaaaccagagctgtcttggttaaagcagggtgcgagcccaggatccagccct

SEQ ID NO: 15974 - DNA, 201 bp, Homo sapiens
ctattggggccatacaggcgtatgccaaatccaaatttagctcttgggactatagtttgccaatcagtgctccactccaaaatgtgttcccaaacctaacygttgctgtcctcaactactaaattacttagaaggatctctgtctccttcctcctctaccatgttagtctactctttggttttcctgctcttgcccctacc

SEQ ID NO: 15975 - DNA, 201 bp, Homo sapiens
ttctgctggtcttactgagggcagttagaagctaaagcaatttctaagctctgatccaaattatttgtaagtcaaggccatttgtttgtacctattttgartacttcaaccctttcgagagaattccaaatacactttttctaaatcaatatctctaaaacttgggtaatgtacaaatatcttttaaaggatgagtcctct

SEQ ID NO: 15976 - DNA, 201 bp, Homo sapiens
tccgaccagggtgcgaggaaccaagcacaagggatcagatgggaatgtgaggaatcctggcaatggtggaggaggcccttgccatgctggccatggtgggrgcttctgatggctctagagcaccacaggcttgactgagatttggtggacacatcaaagtgcctggttgggtagacatggtatcacaggagtagtttgaat

SEQ ID NO: 15977 - DNA, 201 bp, Homo sapiens
agattctcctgccttggcctcccaaagtgctgggattacaggcatgagccactgcacccagtctgtctgttcttaaagctacattttgttaccttaaagtmtttcttgtcccaatatattgtttacatacttacaaactactctatgataatttttaaagtatctgtctaacatgaatggatatcacttaagctcttcttg

SEQ ID NO: 15978 - DNA, 201 bp, Homo sapiens
agtcaccatactctagtattgaacattagaatttattccttctatctaactgtatgtttgtacccattagccaacctttcttcatcctctctccccaaccsccaccaacacacacacacacacacacacacacacagacaaacagacacacacacaaacacacacacacaaacattatttccaccgtctggtatatatcat

SEQ ID NO: 15979 - DNA, 201 bp, Homo sapiens
ctttcatttaggaaggataattttgctgggcataatatttttggctagcacattttttcttttggcactgtgaagatatcatcccattctctcctgtcttkttagggttctgctgagaaatctgctgttagtctgatggggttcctttatataggtggctagatacttttctcttgctgtttttaattttttttctctttg

SEQ ID NO: 15980 - DNA, 201 bp, Homo sapiens
ttcaaaagatctgtattcaagttctgagattctttctcctgcttgttctgtcttactgttgaaggttttgaatgtattttgtatattattcaatgaattcrtcagttccaaaatttctgctttttaaaaaattatatctctttgataaatttctcattcatatcctgaattgtttttctgatttctttgtatcgtttttca

SEQ ID NO: 15981 - DNA, 201 bp, Homo sapiens
ctgtcacccatgctggcgtgcagtgatttgatcatagcagcctctaccactgggcttaagtgattctcccaactcagcctcctgtgtagttaggactatargcacatgccactatgtctgactagtaaatttctttttattgggatctgttgctggataattattgtgttcctttcaaggtgtcaaatattcttgcttttt

SEQ ID NO: 15982 - DNA, 201 bp, Homo sapiens
tgctggcgtgcagtgatttgatcatagcagcctctaccactgggcttaagtgattctcccaactcagcctcctgtgtagttaggactataggcacatgccrctatgtctgactagtaaatttctttttattgggatctgttgctggataattattgtgttcctttcaaggtgtcaaatattcttgctttttcatctttcct

SEQ ID NO: 15983 - DNA, 201 bp, Homo sapiens
ctaatttgtttgaaattgcttttgaaaaggagaactcttttctgacatgtatctatggtattggttgggtagggtactttgcttttgaatctgactatgcrtagtggtgtagtctctgtatgacttcttcatttgtagacagcatcagtggtgtctgagactaccttggtggcttagaatgcagttgttattagtagaggc

SEQ ID NO: 15984 - DNA, 201 bp, Homo sapiens
ggctggtctcagaccctgggagaagtgcttaggtgccacaggtggtcaactggcctggatgatcttcaggcccctggaaagtacatgcaggtgatgctcargcccctggaaggtgtgtataagtgatgcccgtgtccctggatggtatgctcaggtaaagggggaaggagtggagctgagccaggtggacttgctctcaga

SEQ ID NO: 15985 - DNA, 201 bp, Homo sapiens
gccatccagtggcaaaagttagaaaagatgtatttcctcttttgcggggaggaggcaattgataattcttttattttggagctttggcatgtaaaataatrtttttcatatgtcttataggaaatagtttttattctcttcctgcagttttggctgaaatgaagtggcctttcattatcaatagattgtagaaacaaaaaa

SEQ ID NO: 15986 - DNA, 201 bp, Homo sapiens
aaagccctaacaaacaatattgggcttacaaagaacatacctatgtctaaaatattttattcttttttctttaaatgttcaatgattcatctcaaaatgargctgtaacttaagtggcattaaaatgctattcaagtgttcaattgcaaaagacaataggtaaattatatacatatgttaaaaaataagagaaagctttat

SEQ ID NO: 15987 - DNA, 201 bp, Homo sapiens
atttgtttactccctttaactaccattgctctttgctgagtgatgatgcagggcagatggtgtcagggagagaaatcatcaactagctcaggattgaaagsggatgaagatgctggaaatgtgttgatgtttgagaaggatgtgtggaaatgaagaagtgactaaagaggacagccttatcaccaacaacataagcatatc

SEQ ID NO: 15988 - DNA, 201 bp, Homo sapiens
aaaatactcaaagtccttagcaagcaaccattgatggagaatcacttttaagttataaaattagcaaacatactttaaagatgacagtcaatatttatgcrtatgagattcattactcaataaatatctatggaatacctactagtgctggtcactttgtgagaccttggggtacagtgtaatcaaatcaagtcatccaaa

SEQ ID NO: 15989 - DNA, 201 bp, Homo sapiens; identical to SEQ ID NO: 2189

SEQ ID NO: 15990 - DNA, 201 bp, Homo sapiens
gtttcgccattttggccaagctggtctcgaactcccaacctcaggtgatccgcccgcctcggcctcccgaagtgctgggattacaggtgtgagccactgtrcctggcctctagcatcttaaaatagtgaaaacaaaagagtacactattggctggagaagctcacttctaccctatccacgctcttcttttccagcctcct

SEQ ID NO: 15991 - DNA, 201 bp, Homo sapiens
caaaggtattatatttctctttgaagtaaatgaagaaataatatatttcagtagaattaccactcatgattgtgaggttaaagtgatttttgaattggtgwttatttgttctattttaggtttatttgtctcttgtctatttttggaggagatatggaggtttgtagctgccttgagtttccaaaccaacgattatacttc

SEQ ID NO: 15992 - DNA, 201 bp, Homo sapiens
acagattttaggggggatttcaggagtttagttttgaaatattaagaatgatatgcccattaaatacccaagtgatgaggttaagttgttaaaaacatcartaagtccagagttgggactcatacatatttggatctacatggcagatccaaaccagagatgcattaaaggagttgtcagaatatattggaattcaaagca

SEQ ID NO: 15993 - DNA, 201 bp, Homo sapiens
cctgtgagacactgcaaatatgtcaactcgtatgttattaatgttacaatgcagcttttctttaagtggtgttattatatttttggtttatatgctactargagttatgtgctattaggagtcccattgagttggttttgcttccagaattaaactgacctggaattttggtattaggtctgtctccattgattttttttt

SEQ ID NO: 15994 - DNA, 201 bp, Homo sapiens
ggtgatccgggcttgggtgtttgtactgaatttgaggaaaagctgatgaattcaagagatattaagtaggaagaatccaaaaaatctgtgataaattggakgtcggagagagggctggaggttgtcttcaatgcatcaagatttatgatttaggtacaagtaagatggtgctgctcttcacagagaaaggagcatagtgaa

SEQ ID NO: 15995 - DNA, 201 bp, Homo sapiens
aatgtccagtaggaaggtggataaaagtgtttaagtccagaagtgacagagaactctttcttccaaaggtattggagactcatggaaggatttccaatagrgaagggaactcaactgatttttatattagaaaggtctgtaatggaatagtttgaaggagacaaactagagatatgggaattggtgaggatgcttttgaaa

SEQ ID NO: 15996 - DNA, 201 bp, Homo sapiens
agagaaacattggttgcaggtagtatttagcagaaggaacagattcaaaatatattcagagggtagaattggaagggttataaagagttctcagggggttaagtcatcctcctaggcttatggctaagggcatgcactgacaaagggagtgcaggagaagggggagcaggtgtaaggggagatgagagcagaaggtgctga

SEQ ID NO: 15997 - DNA, 201 bp, Homo sapiens
gtcagcctgtcgcttaaaggaaaaaaaaatagtggaacacaactacattatgtttatttttacttatttatgaattatacacatactatattcatatcttstttatgttaaaaatatgagcaaataaaaagacttcattcagaagaatgagatgcaaaagcagtaacaggagtttcattattttttttctcaatgctccat

SEQ ID NO: 15998 - DNA, 201 bp, Homo sapiens
cgaattacagcacactgatgggtcttgactctttattcaatttgccagtctgtatcttttaattggggcatttagtccatttacaattcaggttaatattrttatgtgtgaatttgatcctgtcattatgatgctagctggttattttgcccattagttgatgcagtttctttatagtgtcgattttttttaccgtttggt

SEQ ID NO: 15999 - DNA, 201 bp, Homo sapiens
caatctctgatatccttttttctgcttgatcgatttgcctattgatacttgtgtatgcttcacaaagttcttgtgctgtgtttctcagctccatcaggtcrtttatattcttctctaaactggttattctagttagcaatttctctaacattttttcaaggttcttagcttccttgcattgggttagaacatgctccttta

SEQ ID NO: 16000 - DNA, 201 bp, Homo sapiens
tattcttctctaaactggttattctagttagcaatttctctaacattttttcaaggttcttagcttccttgcattgggttagaacatgctcctttagcttrgaggagtttgttattacccaccttgtgaagcctacttctgtcaattaatcatactcattctttgtccaattttgttttcttgctggcaaggagttgcgat

SEQ ID NO: 16001 - DNA, 201 bp, Homo sapiens
ttgtggatttatctacctttggtctttgatgttggtaagcttcagatggggtttctgtgtggacacctttttttgatgctgatgctgttcctttctgtttrttagttttccttctaacagtcaggcccctctgctgcaggtctgctggagtttgctagagttccactccagaccctgtttgcctgggtatcaccagcagag

SEQ ID NO: 16002 - DNA, 201 bp, Homo sapiens
cacccacagctgccccttcccccaggtgctctgtcccaggaagatgggagttttatctataagcccctgactggggctgctgcctttctttcagagatgcmctgcccagagaggaggaacctagggaggcagtctgactacagcagctttgttgaactgtagtggagtcctcccaggtcaaacttccttggcagctttgct

SEQ ID NO: 16003 - DNA, 201 bp, Homo sapiens
ataaatgagctagagtttcttttccaataaatttccatatttgctgccttagaagctgttggactatggttttatattgattatattgatttataggtttycaagggcaggtgatttttcaaatttaagactttcaaacacaatcttttgacgtagtctctctgtgtctggtcctatttttctggtccaggtgtctggtcc

SEQ ID NO: 16004 - DNA, 201 bp, Homo sapiens
gggtttctccatgttgatcaggcttgtcttgaactcccaacctcaggtgatctgccggcctcggcctcccaaagtgctgggattacaggcgtgagccaccrcagctggctgagatttctctgtttttaaggaaaaaaattttaaaaatatattggttctggatttttttttaaattttattttcttccaattctattccat

SEQ ID NO: 16005 - DNA, 201 bp, Homo sapiens
ttacctccacctggtctctcccttgacatgtggggattgtgaagattatggggattacaattcaagatgagatttgggtggggacacaaagcctaaacatrtcaatagccattctgactggtatgagatgatatcttattgtagttttgatccgtatttctctgatgattaatgatgttgagcattgttttcttatgtttg

SEQ ID NO: 16006 - DNA, 201 bp, Homo sapiens
gtggtgtttttgttttcaaggctactgtagagatgagagggggatgggcatagggcaagttcaaacaccatacggcttgttgttcttactgaaatccaggttttttttttttttttttttttttgagatggagtttttgctcttgctgcccaggctggagtgcaatggcacagtctcggctcactgcaacctctgcctcct

SEQ ID NO: 16007 - DNA, 201 bp, Homo sapiens
caacaagaagagctaactatcctaaatatatatgcacccaatacaggagcatccagaattcataaagcaagttcctagagacctacaaagagacttggacwtccacataataatagtgggatactttaacaccctactgccaatattaggtcaacgagacagaaaattaacaaggatattcaagacttgaattcagctctg

SEQ ID NO: 16008 - DNA, 201 bp, Homo sapiens
atcctttattccaattatttcatgtaacttatttgtgtgcatttttcagtggaatgagaaccaagggtttaatttaaaagttctaacaataaggctgtagtttttttttttccttttacataatgattttaatgtagtcctttgaaaatgtaaatgtgaaactgccaagcatcttttcaccccttcatgatcttcccatct

SEQ ID NO: 16009 - DNA, 201 bp, Homo sapiens
tgtagagtgctggggcaagacttcccaagtaggaggactcctcactgaggaatatggagaacatgtgctgaattcctcggttcatgaaaagaatatcttgyattgaaaaacacaaaaagagaattagtgatggtatttacagtagggtaggtctagccccctgacagttaacacttgtgcttttaatatttcttcaaccta

SEQ ID NO: 16010 - DNA, 201 bp, Homo sapiens
aatatggagaacatgtgctgaattcctcggttcatgaaaagaatatcttgtattgaaaaacacaaaaagagaattagtgatggtatttacagtagggtagktctagccccctgacagttaacacttgtgcttttaatatttcttcaacctatggataattctgtttttgttagttttgttatccttccctttatagatggt

SEQ ID NO: 16011 - DNA, 201 bp, Homo sapiens
gcaaggcagcattgggtatcatttttttaaaagtagattttaagaagcttagaaacaaagtagatattttagaagggattgtgactcatgaggatggtacrtaagaagaaaatgaaattctgattatttacttacgaatgattttttggtttctttttgagacagggcctctctctgtctctcactcaggctggattgcag

SEQ ID NO: 16012 - DNA, 201 bp, Homo sapiens
cagaaagtacatttatacatttgttccaaatgtgctaacatggataatttgcgtaacagaaaactcacattaaaattttaaggaaaaaaagagattaaacwcaaggtttattcttaagtccaattcatattattactggcccacatgtagtcagagttcagcgtaattgaaccagatgtttttcctctttgcaaaaaactg

SEQ ID NO: 16013 - DNA, 201 bp, Homo sapiens
tctctctctattttcttttcttttctttttttttttttttgaggccttactatgaaccaaaataatatgacacaatctaaggtgacaggcagtgttaaggkctgtgttcaggttagggtgctattacttagtattacagccagaggatcagaaatacccaagtcctctgagactacagcaatcacttcccctatggttgct

SEQ ID NO: 16014 - DNA, 201 bp, Homo sapiens
gaacacaaatatgtccagccctgaactcttcatttttcctcttgatgaatcctttcttatgctttaaaacacttgagtttacacacacacacacacacacrcacacacacacacacatatttctggtaggcgtggagatatatatctatatatatcttgctattagggcaattccctgaaagattacactaccttctttat

SEQ ID NO: 16015 - DNA, 201 bp, Homo sapiens
agtgcttctttcttataaatggaatttaactccttgggcaaatgtaacgttctttttacttctgtgattgctaaagtttctttaggataaacatagaaaaraaatgggagtagagggaatacacacacacacatgcacacacacacacacacacacatgctgcaaccacacaaagcacaaagcaattgttgaatatgtctg

SEQ ID NO: 16016 - DNA, 201 bp, Homo sapiens
agtgagctgagattgcatcactgcactgcagtatcactgcactccagcctgggtgacagaggaataccctgtctcaaaaaaaaaaaaaaaaaaaaaaaaaraagacgctctcaagagttctaatatgtaaaatagacttgtaaacaatgaggcttgatatgaaacagtaaagtgatcatttttatagcattatatacagag

SEQ ID NO: 16017 - DNA, 201 bp, Homo sapiens
gtaaagttaaataagcaaatggagaggtaagagaggatggactagagaagtataaaaggggtacaactaggaaaggataataaaggagagtttttccaaawgaaaatgttataggaaaaagctaattaaaatttgtgtgagtcagttattaacacagtaagtcattaggtaacagaatctaattttaacccattttttgag

SEQ ID NO: 16018 - DNA, 201 bp, Homo sapiens
actgaaaataataaagaataaaaaggttttctagagagaatagtagtgagtctgccacactgcagccaagctcagtactagtttacatgccttcatcagarcagcagagactcaggagattctaaagcaatcatcagaggtgtgctcagccttcttgcctagatgcagagtggaacaggtgactgccaaacaggaagtcaa

SEQ ID NO: 16019 - DNA, 201 bp, Homo sapiens
cagtgctaggtctttatgctttttctgtccttccaaccgtgaacgcttagtaaaagaaaacttgctgcaaaatctggaccattgcaaatacccaacacttrtaagaccctgccctcctttcactcacctctttgttgactagccaatcacctgctccaaaaatgatcttccatcacatctgtccctcacttttcctgtagg

SEQ ID NO: 16020 - DNA, 201 bp, Homo sapiens
ttagaggctataccataccacttagttcatattacatgctatctttatgacacattgtttttggcctgttaatgggctcctccccaaatacagggtaaacktcttaggtgcagaaactgtgctgtgactttccctttaatctccaaagaaacctagtgcatgtctcatcatatattaaatgtttaatatatagcctgggtt

SEQ ID NO: 16021 - DNA, 201 bp, Homo sapiens
gttatgatcttgacttttaagagcatatatacttttatgttaacgccattcaaaggtaatcaaagcacacttgcaattgtacagaaaccatgagtgttctscttttaaaaaatatatattattgtatctttccattccaatataaaaggagaggaaggagagaggtggtggagtcatttttggcccagcttttctcagctg

SEQ ID NO: 16022 - DNA, 201 bp, Homo sapiens
tgcttctgtcattggtaacttgagtatacacaaatcagtgatttgtggaacattttctattgccagaatatctggattgtcacctcccctctcacctccaytcaacttctctgaaggggctaaatgctgtttgaaaatccaatccagtgtgtatttacttaacaagatgatcttaaacagacatcaccacctctttagggt

SEQ ID NO: 16023 - DNA, 201 bp, Homo sapiens
aaagggaatgcttccagcttttgcccattcagtatgatattggccatgagtgtgtcataaatagctcttattattttgagatacattccatcaatacctartttattgagagtttttagcatgaagggatgttgaattttattgaaggctttttctccatctattgagataatcatgtggtttacgtcattgattctgttt

SEQ ID NO: 16024 - DNA, 201 bp, Homo sapiens
cacgtgtgcacgcctgttttcagatggctgcttttaaggcatgctagtatacaatatgaatgatccaagcagttgaaaggaagaaactgtataaaaggaaygaacacagggtggaagttcatgcggaccttaggagagacaggaccccatgtctcagttgaaggtttggccttccattatacaagataaaggcagaatctg

SEQ ID NO: 16025 - DNA, 201 bp, Homo sapiens
aacattcactatttaggctcagatgtttgaacagctgacataggtaagggaattaaactttggatttttaacacccaaaggtattcttatgaaatgttaaygaaagttacacatacagtcaaaacatggtctcatcatgaggtcctgttctctttagtgtaacgcttaaaagccttttacctaaggcataaaatttctcat

SEQ ID NO: 16026 - DNA, 201 bp, Homo sapiens
aaactttggatttttaacacccaaaggtattcttatgaaatgttaatgaaagttacacatacagtcaaaacatggtctcatcatgaggtcctgttctcttyagtgtaacgcttaaaagccttttacctaaggcataaaatttctcatacttcttttttagcattgaagtgacttatttctttaaactaaaacacatagttc

SEQ ID NO: 16027 - DNA, 201 bp, Homo sapiens
gtccttttatatttttccacttctattagatcttcaaagctgctaattctagtctcaacaatgatcagcctttcttgctatttatctacttaatttttttwatttaaaaatctgactttttagttctaggaagtcttttttaatgctgttcgtgtgcctcttcaagtccttattttcttctgtcttctgctttccccaaag

SEQ ID NO: 16028 - DNA, 201 bp, Homo sapiens
ttctgctttccccaaaggttctccttcattgatggactgctgtgattgctttcctcattctttccctctctgactgttagcttctttaggtatcctttcaytttcatttgttcttcatggcacaagtccaactgctggacgctttaagtgggctggtcccacaagtgtgggaaggcacagatgtctcagttgtcatgggcc

SEQ ID NO: 16029 - DNA, 201 bp, Homo sapiens
caccagggcctgtcatagggtgggggctgggggagggatagcatgaggagaaatacctaatgtaaatgatgagttaatgggtgcagcaaaccaacatggcrtgtgtatacctatgtaacaaacctgcacgctgtgcacatgtaccctagaacttaaagtataataataataaaaatcttaaataaaaaaaagaaaagaagg

SEQ ID NO: 16030 - DNA, 201 bp, Homo sapiens
gtgtcttagaggagcagcaaggccagtgtgtctggaacactgtgagggaagacaaaggtggtagttggttaacaaggaaagaggtcagggaccaggtgatrtaggccttgaaggatggggcgagccttttgaattttattctaagtgagatggaagccactactaggtttcaagtcacttagtgacgatttatatatttaa

SEQ ID NO: 16031 - DNA, 201 bp, Homo sapiens
ttaacatgcaactataatgtttgtgaaaatgttttgttaagtcatgattttgtaaattaaacctatttcaaatgcactagacaagtttgccatttaaacamaaataatgcttagccaggcacggtggcacacacctgtgatcccagctacaagggatgccaggaggattgcttgagcctgggaggcccaggctacagtgtt

SEQ ID NO: 16032 - DNA, 201 bp, Homo sapiens
ataattgcttgactttcagatatttaaatggcagctaactgatgaaattaactagaatgcttatctaaagtttctattttgtgaacactcacttatatttsggggaaggaaattatttttaggtagttattcctaatttagaaagacttgatgaagtcagaataacctaataacagatgcctccgtctgtgtaaattttta

SEQ ID NO: 16033 - DNA, 201 bp, Homo sapiens
gaatgtctaagtagtgtgattttgctttcatgtcaataaaccattgagtctacaaatcagtcaattgctaccctaataatgaaacatttatgtgtcatgcwtggacatgagtctaaacttacaaagttctgctttctgcacaagatacctctattttgactggaaagaaatctctatatagatcatttttaaaaattgtgt

SEQ ID NO: 16034 - DNA, 201 bp, Homo sapiens
cattccctaatgtgcaaaaatacttggttgaactcctgaaacttatttggtagatcaaaagctgcactgctgtggaatgcaataaactccatctgtttgargtattttcagcaatattgcactacttgggagaaccagggtcccattattctctaaaataagacttttattcccggtaaaattcccagtggggatctttat

SEQ ID NO: 16035 - DNA, 201 bp, Homo sapiens
tttcacgctaacagttcacttattactgattcaaaccaattctttctggccacgttcccataccccaggtattccaaatagaaagaaagggggcaactgtyctaagtttctgctgttataaatgtatgatttcatgtaacctatgtggattctttgacttgtccatgagctctggatgctgtatgtgtatgtatgagatgt

SEQ ID NO: 16036 - DNA, 201 bp, Homo sapiens
tcagtcgacttatagtatgatttttaaaaacagcaggtaacttttgaaattgattaaagatttcttccacaaagtaatggctaatatttataactaattcyaccactctttgaaaagacatttggaaaaaatataaaaaccaatatttttagttcttataccataaaatatacttcaattattgaatagtacgtatgtcga

SEQ ID NO: 16037 - DNA, 201 bp, Homo sapiens
gaggtgctaactctcagaccactcaagaagcatttaggatttgtctctttcactagtggattcaccgatgagttaagaacatttgtaaaattcactccccrcacacacaccaagaagaaacccacttctccttaccagaagccatccatttgttgtgtcatatttgattaagttcttctggatccaaaaaatattcagttt

SEQ ID NO: 16038 - DNA, 201 bp, Homo sapiens
gaaatagattaaactttacaagaaaatagattaacttttatatgaatgtcaaagatacatgtggaaattaactttaaagtggaaactaagcatctgagacyctacaagcttgacataattatgtaatcatgtttattatgattatttttgttgtgattatacagattttgttacctcttttccgtttactctgcctgtgca

SEQ ID NO: 16039 - DNA, 201 bp, Homo sapiens
ctaagcatctgagaccctacaagcttgacataattatgtaatcatgtttattatgattatttttgttgtgattatacagattttgttacctcttttccgtktactctgcctgtgcaaatatgttattttcctcactgaattgcatattgttgaaggactatattaggagtctccaaatgctcacattccctcattcattgc

SEQ ID NO: 16040 - DNA, 201 bp, Homo sapiens
tttgtttcaaatgctcaaattccatgagatgaagcctccccatcttcctggaccaatcgttcttccttaaattccagtttcctacctgtcagcgctgttgmctactatgactgtgttgtgtgtaatatacaaataatgtatactgtctaaggattatcagtgagccatttcatgacctaatttctggctcttgatttttct

SEQ ID NO: 16041 - DNA, 201 bp, Homo sapiens
atgctaaagtttgagatgcctagtacacatgagtttctagtcaggatagagtaagttacaatgctgtaacaaacaactcctcaaatctcagtagcttcaarctacaagatttatttcttgctcaagctgcatattcatctgaacattcatcatcaagttggctggggctcctctttttttacttttttctggagatggagt

SEQ ID NO: 16042 - DNA, 201 bp, Homo sapiens
agcataaaaatgggtttgaagaattagggattcttgtgaattttttagacattcatttgttaatgcgttcatgtattattaacttgaaatctaataagttragacaaaactgttacactaaaagtgtttgtgggaaggtggtggcggggagcagtaacatttaagtagactgaacaagtgagtataaggcacttgtaggaa

SEQ ID NO: 16043 - DNA, 201 bp, Homo sapiens
gtgggactgtaaactagttcaaccattgtgaaagtcagtgtggagattcctcagggatctagaactagaaataccatttgacccagccatcccattactgrgtatatacccaaaggactataaatcacgctgctataaagacacatgcacacatatgtttattgcagcactattcacaatagcaaagacttggaaccaacc

SEQ ID NO: 16044 - DNA, 201 bp, Homo sapiens
gagattattctaaattaccttccatcttagtctgtttggactgctgtaacaaatgactacagactgggtggcttataaaccacagaaatttatttctcacrgttctggagtttgaaaatcctaggtcagggtgtgagcatggtcgggttctggtgagatcccttttctggcctgcacagtgctgtcttcttattctgtcct

SEQ ID NO: 16045 - DNA, 201 bp, Homo sapiens
ggaaggatggaatggaggttgttgaggctggaggataaaagaaagggctttccggtggaaggggtgggatgaccaaaggcaaagaggtgagcgggcacagyatatatccatggagccaagagtcatgcatatgcattgggactggcttgaggaatgcagtcaggagagcagagggacctgagctgggtggggttgggggtg

SEQ ID NO: 16046 - DNA, 201 bp, Homo sapiens
atgcaggaggatcagcaggtttgggagtgaaagaaattgagaggttgttttaagtgtgttgagttcaaggcagctaagaggaaataaacatccagtacagytgagcatatgggccactcactcttctgagagttataggctaaagcggaaggtgtggagaaactatttctcaatagcccttgaagctatggcaaccttgag

SEQ ID NO: 16047 - DNA, 201 bp, Homo sapiens
agcagcgtggcaatcaaagcatccttcaattggcattcaaagtgcacactataatttctttctttgtgaggagattcccaaatgctcaaatatttaaatayaatattaattgcttcatcctatatttcctcattaaaaatattatacaaaggaaagagttttttttttttcagatataactctttcctaatttattctttc

SEQ ID NO: 16048 - DNA, 201 bp, Homo sapiens
ggatacccaaggtctacctccgaagatgatgtttggcacctcttatggcgcacttttctccccagcagcgtggcaatcaaagcatccttcaattggcattyaaagtgcacactataatttctttctttgtgaggagattcccaaatgctcaaatatttaaatataatattaattgcttcatcctatatttcctcattaaaa

SEQ ID NO: 16049 - DNA, 201 bp, Homo sapiens
tccttctgtctccatcagttcctttatcctgtgctgccacttgtgtcaagtccctctcaacaggaaggctcccctgcccagcacacactgcaggatacccraggtctacctccgaagatgatgtttggcacctcttatggcgcacttttctccccagcagcgtggcaatcaaagcatccttcaattggcattcaaagtgca

SEQ ID NO: 16050 - DNA, 201 bp, Homo sapiens
attatgggaatttggttgtggtaagggccagtggagagtaaaaaaaggggcgggtttgagaaatgttcaggaaaattgaggactaggtggtagattagagytgttgggtaatgggagaggtagagtcaaggttacgtctcaggtttccagattcttatgaagtcaccaagatggggaaccctgaagggaagatcaaatact

SEQ ID NO: 16051 - DNA, 201 bp, Homo sapiens
taatgtttctagaccaaattgaggattttggctcttacctaagaccaatgaggagtcatttaaaggtcctgagtagaggaacaacaagatcagatccgtgrgtgaaaaaagaatgtggtattgacaagaagaccaagagtagaccagttagaagtaaaaatgagaaattatgggaatttggttgtggtaagggccagtgga

SEQ ID NO: 16052 - DNA, 201 bp, Homo sapiens
tgtatgtgtaccaatacttctgctcctgtgggataatttatatggaaaatgctggaaaatgacatgacgtttttgaaaaattgaatgaaattttcactgtsgggggaaggcagagaaagaggtagtgagttgtattagatgatattggagatgtaggcagtggctgaatcctgtaatgtttctagaccaaattgaggattt

SEQ ID NO: 16053 - DNA, 201 bp, Homo sapiens
actagaatccaagctttgtaattcctagtacagtcttctttccattaaatcatatttccttttctaaggaatagtgaatgctgtgtggcttacaagtttayttttggtgatggcactttacctgcttttcttcttttaatttttttgacctcagtgactagaactggatcaatagtaatccttggtttatgacgcactctc

SEQ ID NO: 16054 - DNA, 201 bp, Homo sapiens
ctacacattctgcacttgtatcctggaacttaaagtaaaataaaacataaagcaatataaattactaggcaaatactgtccatttcatctaatgaagaaarcaaatgacaaatatcatgtatatgacgtgctacacaaaatgtctaggttcttacattatttattactggaagaaaccttggagatcatggtttctaactc

SEQ ID NO: 16055 - DNA, 201 bp, Homo sapiens
gggcgtctgccattactgaggctggagtaggtggttttcccctcacagtgtaaacaaagccactgggaagttccaactgggtggagcccactgcagctcakcaaagccgctgtagccggattgcctctttagattcctcctctctgggcagggcatctctgaaagaaaggcagcagccccagtcagggccttatagataaa

SEQ ID NO: 16056 - DNA, 201 bp, Homo sapiens
tctccaaccccaaactgtttctgtttgattttctctctttggaatgtcagttattcaaatatcgaatcttctgggccatttctctagttttaacaatgtgkttttttttttttccttgtttacttcttttttttttctttcattttctggaacaattccttgagtttttcttccaaccattttactaacattttaatttct

SEQ ID NO: 16057 - DNA, 201 bp, Homo sapiens
gttctttaacagcgttcttaaaaaggtgaaagggaggtaaaatattttgagatttgcaagtctggaaatatcttttcctactgtcacgtttattgaaaatktagaattctaggttagaaatgatttttccctcagaatttcaaaaacattgctctattgttttttagtttccagtttgctgctaggaagactgatgctata

SEQ ID NO: 16058 - DNA, 201 bp, Homo sapiens
gaattctgtacttgccagagacatctagtcaaacttagttctgtaaacagtcttagatgatataacttagttggaaataacatagctaatcacttgtaaawtttagctaagacttaggaggcagaaaaatttagtgattaaaaatggaattaggttgctggatttgaatgccagtttcatgccacacagtctgtgactctt

SEQ ID NO: 16059 - DNA, 201 bp, Homo sapiens
gattatttaacttacaattttttgactttatgatggtgagaaagtgatagaaattcagtacacttcttgacttattatggtgtgatgtcccaattacaacyccattgtaaatacaggagcatctgtaccactttaagagtagtgcaagtacctgataataacaaaataattttaattctttcatcctgttccttgtattgt

SEQ ID NO: 16060 - DNA, 201 bp, Homo sapiens
tttcttgattaaatcctaattgtgctttctaggaggaacgctcttgtctgttgtctattattcttcctgtgttcaacttgtgaaagtttcttccttgtccrttatcttctttgacatatctgaagaagaaatgggggattgtgaccttcttgagagattcacagctttcacagcctgccttcttcttgtaaaaacttgggg

SEQ ID NO: 16061 - DNA, 201 bp, Homo sapiens
gacactatcactcgtctaaggctccttgcacattgatgggttataaaggtgataaccaagtatgatgcacaaagccagagccaccctttcaaaaagcagcygtgttacctacacaattgtgtgtgtgtgcgcactggttgttttttaaaaagccaattacaattacaattattaaaagaaaaacagaaaattacaattttc

SEQ ID NO: 16062 - DNA, 201 bp, Homo sapiens
ttctctctttttctgaatttaattgccaattagtaacatgaatcttcatttttttcagaaattctctttatattaatatatggatgttgcattgctattcmaggtaaaagtgtttaataatgatgactttagtgttacagaataattgtgctcttatgtctttcttatttcaaagacattaaaacacaattaatagtttcc

SEQ ID NO: 16063 - DNA, 201 bp, Homo sapiens
aattcaggtggtgtctacagctttgagactagttgaattgagattacttaggagatgagtgtaggtagaaaagagaagagggccagagacagagccccggrgcactccagtattttagcagtggtgaataggagggaaaatagcagaggtgatgaagaagcggtagagaatcaagtgactgtggcattccagaggacaaga

SEQ ID NO: 16064 - DNA, 201 bp, Homo sapiens
tgccagccacttaccaacccattagcctgcaaaaagatacttatcactttgaagattccaaggactttagtagttgtgtgctggggaatagggaagaagaytaaaaatgcgtaccgcaatatgacaatccagatgaagcttcatggaggactgcaaatgataccattcagtccctgatttctctttcgtcctaccttggtt

SEQ ID NO: 16065 - DNA, 201 bp, Homo sapiens
gttgcatctgcccaaggctcctttttggttgtcatttcatattcttcttttgacaatctcttccacacggtggcttcaattacaacctgaacattacaackctcacatgtatagttcctgggctaaactccagactcatttttaactgactgtttgaaactctacttggatatttcaaatgtatttcaagctcagcatgtc

SEQ ID NO: 16066 - DNA, 201 bp, Homo sapiens
acaactttcaggaatttgtcatgatgactgttctcatactgctagtaaagacatactggagattgggtaatttataaaagaaagaggcttaactgacttayagttccacatggctgaagaggcctcacactcatggtggaaggtgaatgaggagaaaagtcacatcttatatggcggcaggcaagagaacatgtgcagggg

SEQ ID NO: 16067 - DNA, 201 bp, Homo sapiens
caccatgcctagctaatgaaaaaaagattttttttttttaagagggagtcttgctatattgcccatgctggtcttgacctcctggcctcaagtgatcctcrtgtcttggcctcccaaagcagtaggattataggcatgagctactgcacctggccattgttttgctttttaaaaaactttcaagaaatgattgggttgact

SEQ ID NO: 16068 - DNA, 201 bp, Homo sapiens
aattatctaagggaaacttctaaatattttaagtttatcccaatttagataatttatacactagttgacctgttccattaattgagttttcttcatactarggacaacctttggttcttcttttttctcctcctccttctccccctcttcttcttctactgtttttttttttgagttggggtcttggtctgtcacccaggc

SEQ ID NO: 16069 - DNA, 201 bp, Homo sapiens
aggagaatacctattttccagaacttttgtggggtattaacagtacttaatatgtgttaatttacatactaacttaggtaacaagcgtgtgttaagaatawgtatataaaatgtgtttttggattcaaattttattttaaatgtgatagatagaaatatttttgctaagatatataattatcctccaaattatttttagga

SEQ ID NO: 16070 - DNA, 201 bp, Homo sapiens
aaaccacaagttttggcggaaacagataaagataagcacttattcttatttggcatagatagttccttccttctgcatcctactgctattttcattttatmgatggaatactttgaagcacgaaaaatcattatatcttgaaataatttttaaaataatccaataacaaactcagaactactgaagaataataaaggtaag

SEQ ID NO: 16071 - DNA, 201 bp, Homo sapiens
aacttcactgtgaacaaaagttgtcttattatgcagatagcatctcccaggtaatctctggagctgccctaacaatagatgagaagtctgtctggacatgstgatgactcctagtctcttcattgggattcctagaaacggggggtcttaaaataattgcatttctttgataaagaagctttcttggtcatataaaggaaa

SEQ ID NO: 16072 - DNA, 201 bp, Homo sapiens
agctctggaccagtggtgaaatgacctgacttcttgtatttctaccattttttagtttgtgactttataaagaaattactttgttggggtgtagaaaacarttccccaaaatctagcttgttgacatgctgagtgctttgaaaatgaaaaggccttagaaataggcctcagaaccaaggttctgactttcctctgtctctc

SEQ ID NO: 16073 - DNA, 201 bp, Homo sapiens
aatgcatatgcaggggcaggaggtgggatatatgggaactctgtactttctggtcaatttctctgtgaacctaaagctgctctaaaaatggtctttttttwaaaaagtggtgaaaataattatattatctctatatagatattatatatattatctctatatagataacgtatatatatatataaaatcacagccaaaaaa

SEQ ID NO: 16074 - DNA, 201 bp, Homo sapiens
ccctactgtaaactatggactttgggtgataatgatgtatcaatataagttcatctattgtaacaaatgtcccactctggtgatgcatgttgatattgggktaatgcatatgcaggggcaggaggtgggatatatgggaactctgtactttctggtcaatttctctgtgaacctaaagctgctctaaaaatggtctttttt

SEQ ID NO: 16075 - DNA, 201 bp, Homo sapiens
taggagaacagagtttctgtaagcagtggtaatggtcactatcttagtcaatttgggctgctataacaaaatatcacagactgggtagcttaaacaacagrcatttatttctcacggttctggagattaagatgctagctgattcggttcctggtgaggcccctctttctggcatacagatagccatcttcattccatgac

SEQ ID NO: 16076 - DNA, 201 bp, Homo sapiens
ttgctaatgtatttgctcaggtttcactttctcttcttatgaaaccattagtttcatcctcatggtaacccattagttaacccatgaatccattaatccamgaatgtaatcatcaatttatgaagacagagctttcaagatccaatcaactcttagaggctcctttcactgctaccgcagtagggattaagtgtctaacac

SEQ ID NO: 16077 - DNA, 201 bp, Homo sapiens
tatagttattttaacttttatggttacacaaaacaatgataaatcaactcacttttttccaatatattaagtgcactgtgtgtttccagctgtgtggcagrtataagggcatcagagaggaatatgagatagttttggcccatagaccagaaggggagtcaaagacttaaatggtacaatgtggtcaataaaatgataaag

SEQ ID NO: 16078 - DNA, 201 bp, Homo sapiens
atgtgggatttagtttcctcaccgttgtggtcattgtcctttttcatatactccagtttgtcagtaaagctgttaaagcatgacatccaatactgcatgcwatccctgtgggctcaacctagcacataactcagagggactactgccccttctgttgtggacattaacctgcaattaactcagtcttagatcacattaatt

SEQ ID NO: 16079 - DNA, 201 bp, Homo sapiens
tcagtcaaccatgagatcatgaggtaaacactgatattcttcagcatactgtgttactagatgattttgcccaattgtgcactaatgaaagtgttctgagygcatttatagtaggctaggcttggtaggttcagcatattaaacgcacttttgacttaaaatattttcaacttatgatggatttattaggacataacttca

SEQ ID NO: 16080 - DNA, 201 bp, Homo sapiens
aggaaactaaagaagaccgacatggctggatcatagtgagaatgtaggagtgtggtgccttgcgcagctggagagacagggaggggaagatcttgcaagayctgcagttttaattttattctaattgcaatggaagtctctcaagagttttaagacaaggaccatcatattctgatttacattttaaaatttctttgtgcg

SEQ ID NO: 16081 - DNA, 201 bp, Homo sapiens
tacagtcttcacatgccaggaaacactattcttaaattttttttcagccatttaaaacaataaaaaccattcttagtttagagactgtacaaaaacagatrtcagattgggttggatttagctcagaggccatattttgccaacttttaaacaatgtatttatttatttatttatttatttatttatttatttatttattt

SEQ ID NO: 16082 - DNA, 201 bp, Homo sapiens
tgctgctaaagtgcaggttacagaattcatagtttaaatctctttaatattgttattcttaaattttaatgtgcacaagatacactgggtgggcttcttawagatgcagactcctggacatcacccctgggaggtttgattcatgaagtctgaggtagggcccagagacctgctttatttacttatttatttatttgagac

SEQ ID NO: 16083 - DNA, 201 bp, Homo sapiens
actcttggacatgtttacccttacatttatagatttcttatttaagcatccttgcattcctaagatatacttgattatagcaattaatacttttattgtaytgttgaagtaattccactaatttatgttatttgcatttcattgtctctgtatacatttattattgtcaagttattgaatcaaagctatactagtcagcat

SEQ ID NO: 16084 - DNA, 201 bp, Homo sapiens
ccctagtaattactagcaggtaaatccttagaagcactgaaaaaggtagtgatacataagggcaagttagaagttgtgaagtgtgttctcttgcttggtargaagaaagacaactgggtcatacataagagattgtggcactgaacaggggagttggtaagccactcctcgggacctcaagactaaagtgcacagggctaa

SEQ ID NO: 16085 - DNA, 201 bp, Homo sapiens
ctggggctcctccagtcccattccgtccaggcccattacctcctttccccagcagcagtgactccttcggagcccctccacaagttccatctaggcctacragggccccgcccagtgtcccaaggtaaggcatggagcagaaattgggggggtagtgcgccttggttctcttctcatagaatgacagacaaaatttatttg

SEQ ID NO: 16086 - DNA, 201 bp, Homo sapiens
ttttcacaatgaacagagactataggaaaattgccaaccctgttatgccatttaaaaatcacttgtgatcattgaaatttctcatttatcaattggcacaractaaataggactaaagaacactccgtcccaatgaatgacattttggcagctattgggagaatttgagggctttgaaacaaaagagctatggaggattgt

SEQ ID NO: 16087 - DNA, 201 bp, Homo sapiens
ctcttaatttaaatcttttatttagactggacattttttgagtgttttaaaaacaaaagtaagttgaggcagatggtaatgcgtatttgcaaattcttttygtgaatgttggaaaattacagttgcatcaaaatacttacttgtagataaggctaatagaatatatttgagccttctttaaagaaagcattgcccacattc

SEQ ID NO: 16088 - DNA, 201 bp, Homo sapiens
aattagccaggtgtggtgctgcatgcctgtaatcccagctacttgggaggctgaggtgggagaattgcttgagtctgggaggcagaggtttcagtgagccrcgccgagattgtgccactgcactccagcctgggcaacagagtgagactctgtcttaaaaaaaaaaaaaaaaaagtcagaggtggaatcagattctgtgaa

SEQ ID NO: 16089 - DNA, 201 bp, Homo sapiens
cctgccccagcattgttttccatggaggtttctgctcttgggtgtctgctctgttgagttgtgattctctatattcacctgtctctccaaattttgggaasagctaattgtctgtgatttcacttcactgacagatctaagaagggttggtttttcagtttgttcagatttttacttgttgggatggaatgatttccaagc

SEQ ID NO: 16090 - DNA, 201 bp, Homo sapiens
cacaggtagaaggtatttactaagtgtgtgttgaaagactggagatacttagtatgagccttattgaatgaatgagctctttgaacacagaagaattatcsagagtctgggctgtatgtgcaaaacgccaaggactttaaaacttatgtggctttcttggtttatttactcatctgcagaatggagataataaacattatc

SEQ ID NO: 16091 - DNA, 201 bp, Homo sapiens
gcccagactggagagggatgctaaatgggggttataaaagcaacagcacactgaaatggaaattgggcaccaaggcaatgctgaaacagggaatcaagggygacaggggctggaaatatggagagaggcttggaagacagtgatgagaaccgtggtctattccataattttctctgggattggccttccttcttcaactag

SEQ ID NO: 16092 - DNA, 201 bp, Homo sapiens
gtaaagtgaaaacaattttcgttaaagaaagtgttgaaggacccaaggtaatagaacattttaagagtgaaattaataatattgatgcacagttaataaarcatgttggaattgttcctgtgacatctgtctcaaatgaaaggcttttaagaacgtccacatcgctagtcttcaagtgagtctcagatcattgtttataca

SEQ ID NO: 16093 - DNA, 201 bp, Homo sapiens
attatatatatgtatatattttataataatatatatgatccagatacaaagtggtgcttgccattcagtgaaacagtggataaagaacagaaagcagttcrggaggaacaaacgaatggcactaggaaggaagacaacagagcactcgaatgttatcatgggccgtttctcagcctaacttcagcattatgagacacttat

SEQ ID NO: 16094 - DNA, 201 bp, Homo sapiens
agcaattatttttgtatttccagacttgaattatttccacttccatagaataaaatttctgttcccctcttgagcatcactacttgaacaacttgcaggcytctgaaactcagcccactcaaaactcaccaaaactaaattggtttattttttgcctttgcctccatgccctgcaaacctattgctcttctgcatgttcta

SEQ ID NO: 16095 - DNA, 201 bp, Homo sapiens
aacttgcaggcctctgaaactcagcccactcaaaactcaccaaaactaaattggtttattttttgcctttgcctccatgccctgcaaacctattgctcttytgcatgttctatctttgctaatggcctcagcagccacacgtttctcccaaactacacgtcctcagagtccctgtgggtgtatctttctccttctaaaaaa

SEQ ID NO: 16096 - DNA, 201 bp, Homo sapiens
ctttaaatgacaggcttattttgtttatttttgagaaaatatctgccaaaaactgaagttttagtaacgatagattgttagccagtttttcaagtaaaaayggaatcccatgaaaaacagcatctgcttcaccttacaactgctttgcttgagacaagcacttcaggatacagcagaagtgcttgtgtgtacttcttattt

SEQ ID NO: 16097 - DNA, 201 bp, Homo sapiens
gttatccagtagacattcagcaatgccaactgtacaaaagcttttagactctcagctagtgtgcacttctccagctaatgcagcacaatgatttatcctawaaaatgcttcaaggactttttcacttctagtttgaaaagccctaacaaacaatattgggcttacaaagaacatacctatgtctaaaatattttattcttt

SEQ ID NO: 16098 - DNA, 201 bp, Homo sapiens
ggaaggccaattcttgtgcctccaggttgctttctcagatgctgctaatggcatcagtgggtctggcaagtgaacaggttcttaagcccctgggcagtggrtgtggcatgggcaatggcagtagcaatggtggaacatccatctgggacccaagtggtccacccctgtggtagcagtggctgcaagaggttgggtgggctg

SEQ ID NO: 16099 - DNA, 201 bp, Homo sapiens
agctaatttcaaaggcaagatgagccctagtgacaaaaataaaaacattcctttttgtttccatagaatttattgaactggacttacccatgtcagtttaygtattttaatcctctgtgttgtggtaaaatcatgcatctttcaaaagcccatatgcttagcatgattctatcaactattcttaaattacattcttttcac

SEQ ID NO: 16100 - DNA, 201 bp, Homo sapiens
tcaaggttcacattcttcctgcacaatcatatgtatgttgttatttctccttgaaaagcacattttccttttgtgaggagatcacagttgctcaggaaaawttttccttccaggcctgttacttatttttccctttgaaaatgttttcgtgttggcatagtgatttcctaaattgctcagggtagagtctatctcctccta

SEQ ID NO: 16101 - DNA, 201 bp, Homo sapiens
gattggacagaatctataggacaaaaaaaaatttttaataacaaattgcaagagcaagaaatagagagatggagaagtctgaagattaaaatagacataasagaaatatctaccaatcacagtgacatggtttggatctgtatccccaccaaatctcatgtcaattgtaatccccaatgtaggaggtggggcctggtgggt

SEQ ID NO: 16102 - DNA, 201 bp, Homo sapiens
aataaggaccactcattttcttcccccatttcttttacaatgtagagaaaaatggtcaagagcacagatgctagagttagactccctagatttgagtcccmtatgtcacttactagctttgtgaccctgtgcaaattatctgacttttttgtgcctctgttttctcatctgtaaagtaagaataacaatagtaccttcctc

SEQ ID NO: 16103 - DNA, 201 bp, Homo sapiens
ataaaaccgtggtaaactatggtatactatggtttaccatagtatactatagtagaagacacacatttagcagctattaaaagatccagctattgatcagytagtacaactcgttctatagagtttgacttagatgctagaatttccttcatccccaaactacaattatcatcatagagacaagaggacacagatctatga

SEQ ID NO: 16104 - DNA, 201 bp, Homo sapiens
aggagggcgaggatcaaaaaatttcctatcaggtactatggttattacctgggtgatgaaataatctgcacaccaaaccctgtgtcatgcaattaacctayataacaaacctgcatatctaccccctgagcctaaaataaaagttaaacaaaaagaaaacattttatcatgaagtatgagtttattcatttatttatttat

SEQ ID NO: 16105 - DNA, 201 bp, Homo sapiens
tctttataaacacttattttagtattaatcaactaaaaatgatttccatttgccacacagaatcagattcagtgccatttcactgccactcaggaggagastacaaaagctatagagacaataacatatactgttttctgaatttagaggtttgttttgtttagttagttagtattttgttttgagcactgattttatgtc

SEQ ID NO: 16106 - DNA, 201 bp, Homo sapiens
agtagatgcctttttctaactcaaaaagaggcagttaaggagtaattattgagcctccagatctaaataccaaattataggaaatacaaggagtggaagarcacattaaatgatatgcaggggatgcaatcagccaaatccacactgggggattggacagaatctataggacaaaaaaaaatttttaataacaaattgcaa

SEQ ID NO: 16107 - DNA, 201 bp, Homo sapiens
actcccaatgtcccttaggggagtaaaattcctctccacgtgagaaccactgcactgtagtattcgaaagaattcccttccatgtaaaaccatgaatttcmgcattgagccttgctacaagcaagatccaatttattattttagaaaacctcaaattgactaggaaagtgtctgccattgtaccaggaaggtattgaggcc

SEQ ID NO: 16108 - DNA, 201 bp, Homo sapiens
cattgtgaatctccaagagatgagtaatgtctacatatttctcagacttatttgaccatagaacatctcacagatctagtgtcctgaggcacatgccttargaaactgcttcagtggctttaagccaaaggaaaagacattgagtgtgatttcctcagtacagactctcactaacaaaaagttggatgataaaatcaaatg

SEQ ID NO: 16109 - DNA, 201 bp, Homo sapiens
tcatagtattacaatgtcaatttccttatcttgatcattgttgtgtagttttgtaagatactaacattcgaagaatctgggtgaaggatgtacaggaattytttgtattaattttcaaccttttaataagacaaattatttcaagatgaaaattattttacaaatcaaagatagtgttaatgatagcttccttagacctct

SEQ ID NO: 16110 - DNA, 201 bp, Homo sapiens
tatgacaagaaagcaggtttcataccaaacataaatattttccaatcagagctttttccaatgagatcaaagtttctgttacccaatagtggatgggtccragcagagactggatgacaacctgccagatttgttgaacctatgaaggttctctgattctctggaagacctctttctccctgcacatgtaaaaatcctccc

SEQ ID NO: 16111 - DNA, 201 bp, Homo sapiens
ctttggtgttgtgtctagaaagttattgctgtaccagggtgatgtaggtttttatcctatgttaacttttaggagtcttttcagctttgtgggtctattayccaccttgagttaatttttattaggagtgtgaggtttgtgtctatattcatcttttagcatgtaggtgtccagttttttcagcaaaatttttttgaaaaa

SEQ ID NO: 16112 - DNA, 201 bp, Homo sapiens
cacaagccatttgatttcctttttgaatgtgatggcttctcttggtggacaattttagaaatttcatagacttttaatttaattttttattaaatacttgrcgtttcagttaaatatttttgatattaaattaggcaagttaaaggtagagaaaatcttaacatgtaaggaatataaatatatcaaaagccctaaaagttt

SEQ ID NO: 16113 - DNA, 201 bp, Homo sapiens
tttccataatttatctaagtggctttatatctttcaagaacagaaagtcgaatagtgggatcagcatcaagttgtggatatactgatttttaaaaattatyatcttatttcatatggagtaaatttagttcattgaagcatacagcattctaacaaaacaagtaccagggaattttatttctaacaacagtttaccaatct

SEQ ID NO: 16114 - DNA, 201 bp, Homo sapiens
cttttaatacacagattcttatagtaaaagcatattcatttgaaatacacaaactttagaaaactatttaattgagtagatttggatagtggactattgtrccccaaaaagggtctcttatgtctatacatttgcacagaatactagtgtatgggtgtttgcacttgaataattcccaaattggcacaaattaattagcaa

SEQ ID NO: 16115 - DNA, 201 bp, Homo sapiens
gcagcaaccagagtggtattttttaaaaaatagatcagatcctatcagacccctctgcttaaagtccgtgtatttttccatcaagctgacaaaaaaattcraatttatcatggcctatgagcccctccattgtctggcttctggctccttctctgaactcatttctgagtctccgcattgttcaccctgctccagtgatac

SEQ ID NO: 16116 - DNA, 201 bp, Homo sapiens
actttctccaggaacatttccattttaataataatcactaccagtcaccatgctaaatgctttgcatgcattatttcaaattcttaaaacaaccctcttartactatccccatttaacaacaaagaaattgagtccccgagaacttaagtaacttggttcaaagtcacagactagcacacataattaacaagtatcagggt

SEQ ID NO: 16117 - DNA, 201 bp, Homo sapiens
gtcagaggcttctttgcattatcagaaaattatccttcatatccttgtgccacattgtcagtttcttctcatttttttcctcaatggcaatggctaaaacrccaggggctccatattgcttcagacagtacttcatctgctgctgtcatcttgcagatatcttcccttggccttttagcctcatctctcttctctttagtc

SEQ ID NO: 16118 - DNA, 201 bp, Homo sapiens
tcagaggaaggaatattccagttgaggctgtaagggtgagtagaaatttaccaggtggtgaagcagtcaggggaatagaggcaacaatgcatgaaaagtcytaaagggatgaagggcatgccatacagtccctcacctcaggaccatcaccagcactgtcatcatctgtctgctgaaatatcactcatgcaaaacacaggc

SEQ ID NO: 16119 - DNA, 201 bp, Homo sapiens
agatgcatccaagacatctttttgaagcctcagacagagcagtagtatgaagacctatttttccatgtaataaaggctcatataaaacttttcaaaatcarttcaaggaactcactttgatatgacttgacatgaatttaaataacaacaataataataccaagaggtaataatttagaaataatttgaaagccgagtttt

SEQ ID NO: 16120 - DNA, 201 bp, Homo sapiens
agatccagatctgtggccaaatgtcttgctcatacttcaactcccagtaatcacaaccacagctgagcaaccacagacctctaccagagggcagagctcaycagaacatcttggaataggagagaaatgcctgtgtcctgcaggcacgtcttgctcaatttctcctttatagctcaccagtcaaatcagccagtcctcctc

SEQ ID NO: 16121 - DNA, 201 bp, Homo sapiens
tttgctatatcaagagaaggaaataacagatcaaatatcaaatcaactgaggtccaaaaaactcgtccctttggcaatgaatcatggtactttgagacaayaggcaacggtcaacctccaatttgaatggttgttgcattgatctttgaggatgctatagaaagataaggaaaaaagtatttataatatatataaaatata

SEQ ID NO: 16122 - DNA, 201 bp, Homo sapiens
gaaatcagcaatattatctgtaaggtaaaagacaatttatagtcctaatttattaaatttatattattgacatcataggtttgatgattaatttgtgatamtgtaagatctttgtgtcattaatttattgtcaataatctttgaagaactttgaatgctgagaaaatactggtgagactagtcagtcaacaaatattaatg

SEQ ID NO: 16123 - DNA, 201 bp, Homo sapiens
gaatgatccaagcagttgaaaggaagaaactgtataaaaggaatgaacacagggtggaagttcatgcggaccttaggagagacaggaccccatgtctcagytgaaggtttggccttccattatacaagataaaggcagaatctgtggttgcaaatgtaggtagtctcatggatttgttggaaagaagatggattattctta

SEQ ID NO: 16124 - DNA, 201 bp, Homo sapiens
tcttcacatatataatccatttttcattataataagcctcaagttgatattataatccccattttataggtaggttaacagattcagaaaggttgcctcakgcagtgtcacataagataataaatggcacaaaatggatttgagcaggtgttcatggtctttaatatatcctgaattttactcatcttacattagcaaata

SEQ ID NO: 16125 - DNA, 201 bp, Homo sapiens
tcataaattatacccattttaaattcactagacaagtttactatttaaaaaaatgtggaatgcatctgttggaaacatacatttaagaccctcccaaaaartgactaattaacatatgaaaaaaagttttcatttcactggcaaccagaaattgtaaaataaaacagccatccagatatcatgattgggctttcagaatag

SEQ ID NO: 16126 - DNA, 201 bp, Homo sapiens
ccattttaaattcactagacaagtttactatttaaaaaaatgtggaatgcatctgttggaaacatacatttaagaccctcccaaaaaatgactaattaacmtatgaaaaaaagttttcatttcactggcaaccagaaattgtaaaataaaacagccatccagatatcatgattgggctttcagaataggagacgtgagaaa

SEQ ID NO: 16127 - DNA, 201 bp, Homo sapiens
tttaaattcactagacaagtttactatttaaaaaaatgtggaatgcatctgttggaaacatacatttaagaccctcccaaaaaatgactaattaacatatkaaaaaaagttttcatttcactggcaaccagaaattgtaaaataaaacagccatccagatatcatgattgggctttcagaataggagacgtgagaaaggtc

SEQ ID NO: 16128 - DNA, 201 bp, Homo sapiens
gagctcacaagttcgagaccagcctagacaatctggcgaaaccccatttctacaaaaaataccaaaattagccaggctgggactgcaaggctgtagtcccrgctacttgggaagctgaggtggaaggatggtttgagcctgaaaggtggaggtggcagtgagccaagatcgcgccactgcactacagcctgggcaacagag

SEQ ID NO: 16129 - DNA, 201 bp, Homo sapiens
aaaaatgaggccaaacaagaagacaacccaaagaagcctctatgtttcttcactacatcaacttgagaaacgtgggcactgtgacaaccagaaatccagasaggcaactttgaactataaggccaactcaaaaaacgaatccaagtaagaatttacaacggggaagtccaggtagaagatgcctgatggtaaatatttatt

SEQ ID NO: 16130 - DNA, 201 bp, Homo sapiens
tgatgattttctgattgagattaaaaccaaaacccaattatactgttgacatttataataggacttttaaaaagtaaaacaaatggaaaaaaatgtaaaartaaaagaagaaacaaagataggtcaggcaaatgcaaagaataagtgaaaagactttgaaatactatacaaaaatattgtattatatttttgtaatgaaat

SEQ ID NO: 16131 - DNA, 201 bp, Homo sapiens
attgtttctcatttgcaatcttgtatacttttgttttctcccatttccccccttaattaggattgtaagtgtattatctactggtaaagggaaaatacttstggatgtccttaacctctgttatttttatatttcctatttccttaattttggccttaatctgtgttaattctctttgttggtttattttattttttaaaa

SEQ ID NO: 16132 - DNA, 201 bp, Homo sapiens
tgtcatgggccagtaataggcactgctatgggagactcaggggagccttctgcattagagtagaaaaacttagcccctccacaccttcttaggaccagagrgtcaggcccacttaaaggtcctgcagtcatcaaagacagctcgaccaagaatctgatgtttgctggttcttgtcctaaagctagaaagtgccacaacaga

SEQ ID NO: 16133 - DNA, 201 bp, Homo sapiens
ctcttgtcaatttttatttttgttgtaattgcttttgagtatttagtcataaattcttgccaagaccaattccaggaaggtattttctagattttcttctraagttccccacctacaaccatctgatctttgacaaagttgacaaaaataagcaatggggaaaggactccctattcaatagatggtactgggataactggc

SEQ ID NO: 16134 - DNA, 201 bp, Homo sapiens
caagttaaaagaggccatgggattctgggagaccaatgaggaggctattgtataataatagtccaaaagagaggtgattataataacaatttaaagaggayacttttatgtagtaaaatggaagacaggtgataaagagtgaaaggtgtccaaaatacccctaaagtatctgaattacaccactaaaatgggaacattgga

SEQ ID NO: 16135 - DNA, 201 bp, Homo sapiens
gtgtccaaaatacccctaaagtatctgaattacaccactaaaatgggaacattggaagaagaccaagttgtaaatcacctgttcagtttttcacatcaagrttccttggcaatactcaagagcagaagtcaataggcagtatgactctggggaaggtctagacaggagatataaacacatgggccttctgagtttaggtgg

SEQ ID NO: 16136 - DNA, 201 bp, Homo sapiens
aagtcaataggcagtatgactctggggaaggtctagacaggagatataaacacatgggccttctgagtttaggtggagatggaggctcttaggcataaatragcacaacttgggagagaataagggagaagaaagcttgttaatcttgtatactgctagtgtgtctaaattggactatcttttctggaaaggtaattagga

SEQ ID NO: 16137 - DNA, 201 bp, Homo sapiens
gactcataaaatatcttcagagaattgatctagcggctgagcaatagcaattccttccccacagcacaagttccaatcagttcacacccagtgtataataytgaatacatttgtatttactttttaattttgtagcagtacagataactctgagctttgtaatgtgattttttaaaaaattatattgtaaatacatgtaga

SEQ ID NO: 16138 - DNA, 201 bp, Homo sapiens
cagagtttcaggaatacaggattgaggacttgcaccaaaatgtcgtcctctctgctgttattttaactcacacatagacctctttatgccattgcatgctrtacttgtcatcctatacctgtctgacacctaaaacaatgaacctcccacaatatgctttgtgccctccaaatggaagttaaactagatgctttcctgtca

SEQ ID NO: 16139 - DNA, 201 bp, Homo sapiens
agtaccacttttacttttgtttttaactctattacttattactcttccctatccattgatggtagtgtgtttaatttcacaaatgttctatattaaaaatrcacacatacctaattttttattaactcattccacacaaacctttggagcatatgctttttgccagctgccattctaggccctggtgatacagaggtgaac

SEQ ID NO: 16140 - DNA, 201 bp, Homo sapiens
gtgaaggagaatttcccatctattggctaagcaagccgagttatttaaagggagatctgatgcactctggggggataggccagcctccatcggttagtcasgagtgagcagaaaggctgtcgggagctgagaattcacaagcctgctctcagatgcgcgcctactggtaggaagtctgaaacaatgtcctggaaagaaatt

SEQ ID NO: 16141 - DNA, 201 bp, Homo sapiens
ctaatagattacattagccctgagaggtggtacagatacttcccaaacaatttatataaaattatgactgcataaaaaattagtctgttcctaaaggaaakcatctctgaaagcatctctcagctcagagattcattgcaaggaaaacctctctgcctttcctgatgttttctgttatataaatacagttgaagtgaacac

SEQ ID NO: 16142 - DNA, 201 bp, Homo sapiens
gtgtgaaataatttaaccagctccttcttactcaaaactattaaatagatgtgatcatttactctatggaaaataaagtttgattgtatgtgtgcatgcaygggcttcaagcttcattgtgaataagaatcaccttggcaacatatttaaatgtagatttttgggtttcatatatatacattctcattcatttggaatggt

SEQ ID NO: 16143 - DNA, 201 bp, Homo sapiens
ctgttctttgtgaagtagagagttaaaaagccgtggagaaaagtgcattagcccagactggagagggatgctaaatgggggttataaaagcaacagcacamtgaaatggaaattgggcaccaaggcaatgctgaaacagggaatcaagggtgacaggggctggaaatatggagagaggcttggaagacagtgatgagaacc

SEQ ID NO: 16144 - DNA, 201 bp, Homo sapiens
actttcattttaaaaataaaatagctgaatgaaaaatagtttgctttagttaagaatacatacataaagtgtttaattgttaaatgtgaaaaaagttttgmgtagccttgtgttacattttttaagcttgaccagaatctaagaaagatgaaaattaatttcaaatactgaagctaaaacatgttaatgaactaaataaaa

SEQ ID NO: 16145 - DNA, 201 bp, Homo sapiens
gattggagtgttccaacaggttgtgacatgattggattgatggtttagaaagattgccctggctgctggattgtgcataataagtggtatggggtggatgygtgaagggagcggggatggctagcatggaagaagggagaccagattggaaactctgaccatggtccaggcaagagaggatggtggctgggtagtagctgg

SEQ ID NO: 16146 - DNA, 201 bp, Homo sapiens
aggggcatcagaaggagattccacatcaaagcaatcattaaatcctgccatttgtcttctttccatctctaccattactgccttggacttgacatttattrtcttctttctgaatgacatacaccggctactgactagtgactcatcaccctgtctttgatctttctcttcttcaacgttttctatataatccccagtgat

SEQ ID NO: 16147 - DNA, 201 bp, Homo sapiens
acttccccaatttttctttatttgagaaagtctattactccttcacttttccttccccttccttccctccctccctccttccttccctccctccttccttygccccctcccttcctccctcccttcctccctcccttcctcctttcttccctcccttctttccttttttcttcctttcttcctttgttccttccttcttta

SEQ ID NO: 16148 - DNA, 201 bp, Homo sapiens
ctattatgttctctgaaacctgtcttgtatttgaatacccatatggtcaaacagttcttggttatatcctactgaagctttcttcttttttttttttagtytttttttttcttctattctcttatagttagaaatcagcatgttttgacaattatatattaagaatctaggagttaagtaacagaaatttttctttatcat

SEQ ID NO: 16149 - DNA, 201 bp, Homo sapiens
gcctggtgaactgtaggggagggaagaggaaagtcagtcaagggagccttcacagaggtgctggacctttttagaacgcaaaagactcaatctgagaggcrtcagagggagacagacacaaggtgaagatgtagaaaagttcttgatggagagcactcttccatgccctccttgtagctagagaaaaccaggctgtagctc

SEQ ID NO: 16150 - DNA, 201 bp, Homo sapiens
aggaaataaacatgtatccgaagtccctgaatacacggtcatctgcatggtctcaaatctccataccctctctgaggcatgaattatcacctccatacagrgagaagagaaatcgaggaacttacagaaggttcacatagctagtgtcagagctcctatgtgaacctctatgttaactccaaaccatttgtcatttcctct

SEQ ID NO: 16151 - DNA, 201 bp, Homo sapiens
gcacttatgaagaatgcgccagtctattttccttaggtgtataaatagctatggttttttttctgcccaaagtcaatatttcaagtattttcttactttastaatgctgtcacaactcatcatttatagccccttcaaagggccattagtgtttcacaatatgtaatgcaggggtgcccaatcttttggtttccctggcca

SEQ ID NO: 16152 - DNA, 201 bp, Homo sapiens
ataggtaagggaattaaactttggatttttaacacccaaaggtattcttatgaaatgttaatgaaagttacacatacagtcaaaacatggtctcatcatgmggtcctgttctctttagtgtaacgcttaaaagccttttacctaaggcataaaatttctcatacttcttttttagcattgaagtgacttatttctttaaac

SEQ ID NO: 16153 - DNA, 201 bp, Homo sapiens
gtattcttatgaaatgttaatgaaagttacacatacagtcaaaacatggtctcatcatgaggtcctgttctctttagtgtaacgcttaaaagccttttacstaaggcataaaatttctcatacttcttttttagcattgaagtgacttatttctttaaactaaaacacatagttcagcttggttgtaatagtggaattatt

SEQ ID NO: 16154 - DNA, 201 bp, Homo sapiens
ctgggggattggacagaatctataggacaaaaaaaaatttttaataacaaattgcaagagcaagaaatagagagatggagaagtctgaagattaaaatagmcataagagaaatatctaccaatcacagtgacatggtttggatctgtatccccaccaaatctcatgtcaattgtaatccccaatgtaggaggtggggcctg

SEQ ID NO: 16155 - DNA, 201 bp, Homo sapiens
cccctccttttcctgtcgccctccgtgaggctccctgtgaggctgtggggctttatcccccgagccccctcccttaggtggagatgctttccttctcgccwgggttctcgttcctctcagctgtctactgttgcctgcctctagctggggaggcggggtgcgaggagaaagacgtcgtttgttgtggtgaagctttatcca

SEQ ID NO: 16156 - DNA, 201 bp, Homo sapiens
tagttgtaataattatctgtgcttcaataaactggtttagaccaagatagactctacaagtacaacagaaacttatgtttacactgtgtataagggggtcrttttctgctgtacaacattagtatctagtctgcatgtcagttttgaagtagatgcctttttctaactcaaaaagaggcagttaaggagtaattattgagc

SEQ ID NO: 16157 - DNA, 201 bp, Homo sapiens
gtccccagttgtgaccactaaaaatatctgtagacactcccaatgtcccttaggggagtaaaattcctctccacgtgagaaccactgcactgtagtattcraaagaattcccttccatgtaaaaccatgaatttcagcattgagccttgctacaagcaagatccaatttattattttagaaaacctcaaattgactaggaa

SEQ ID NO: 16158 - DNA, 201 bp, Homo sapiens
tttacctgtgggtttcagatgagctagcttgccagtacccttcagaaaaatcaacttttgaatgctaagctgacttgttaagcagggtggagttgccgttrgtattttccagctcgcacgaacaaggcagccggatgagaatgagtagcccgagctggatggccggcacatgggcagcagggcttaatgagactacattag

SEQ ID NO: 16159 - DNA, 201 bp, Homo sapiens
ttccactccattcctactcatctgttcctttggcttcaacttcctgctctgttgctcactgtcaaattattgtctccagacaagacttttgtcctgagtgmcaactgttcagtctaactgcctacatgttgtttcaatcagatattccccaggcatgtaaagataaatgtgtacaaataaggaccactcattttcttcccc

SEQ ID NO: 16160 - DNA, 201 bp, Homo sapiens
aattattgtctccagacaagacttttgtcctgagtgccaactgttcagtctaactgcctacatgttgtttcaatcagatattccccaggcatgtaaagatmaatgtgtacaaataaggaccactcattttcttcccccatttcttttacaatgtagagaaaaatggtcaagagcacagatgctagagttagactccctaga

SEQ ID NO: 16161 - DNA, 201 bp, Homo sapiens
aggttacttttcttgcaaaggttaaagcagaggggacttcattatcatgccagctagcactggcttgtttggaaatttggctattatctctctcctgataycatggaaggttagagaaataacttagtgttggcttggtggtgtggaacttcagcttgagtgaccccattttggcttggtatgtgttgggcttagtgcagg

SEQ ID NO: 16162 - DNA, 201 bp, Homo sapiens
aatcagccaaatacagtatttttacttcacttgtaaaactcattaccatatacagcttttgtcaaatataactgcaaaatctcagtaattcagaattgtcratttctgatttatatgcctaccaacaggggattgttggtggttattatatgcctgtaagatgataagaaatgcacaatgtcctgagcataagacatactc

SEQ ID NO: 16163 - DNA, 201 bp, Homo sapiens
tgatattattatactatgcaattttgagacaccagtggttctctttcagtgagattaagcttggaatgtttgtttaaaaaggcactattattttcttatasattttaaagtttacaatattcgcccaaatttctttttctttttgtttatttctttgctgtaaccatatgtttgcttacctgaagaaatggaggtaggcat

SEQ ID NO: 16164 - DNA, 201 bp, Homo sapiens
tttaaaaaaaatgtaaaacagatatttacaggggtatctaaagatagaggtttttattccctgatttactcagttgctgactcaataagttgtgggtcggygctcttctctgggcaaatcccatctgcattgtctggtaggcaagacttggcaggttcttcttttattgttaggtactattattcctgttgtttatattac

SEQ ID NO: 16165 - DNA, 201 bp, Homo sapiens; identical to SEQ ID NO: 16164

SEQ ID NO: 16166 - DNA, 201 bp, Homo sapiens
tgtaaatatgttacaaatatcataccgtgtctctgagttctgagtcaaatttgcagtgtttttgaagcagcattgccttctgttacctggctgctcttgtrtagtttagcatgaatgcatggcagtttgccctgtaggaacaaatctagtctatgtggatatactatcatgattcagttaggtctcaagatcagtaaatta

SEQ ID NO: 16167 - DNA, 201 bp, Homo sapiens
gatttaatttgctcttctttttctagtattctaaggtagaagcttagattattaattttagatgtttctttttttctaatatcttattcaatattatacayttccttctaagcaatgcttttgttgcattccacaaatttggtaagttgtattttcatttagttcaaactgttttttaagtttctcataagatttttttta

SEQ ID NO: 16168 - DNA, 201 bp, Homo sapiens
ccctattctggacatgtcatatgaatagaatcatttaatatgtggtcttttgtaataggcttttcttgcttggcataatcttttcaaggttcatccatgtygtagcatgtattagaacttcatttctttttatggcctaataatattccattgtctggatagatcacattttgtttgtccattcgttaactgaggagcatt

SEQ ID NO: 16169 - DNA, 201 bp, Homo sapiens
caaggttcatccatgtcgtagcatgtattagaacttcatttctttttatggcctaataatattccattgtctggatagatcacattttgtttgtccattcrttaactgaggagcatttgagttgtttccaccctttggttattatgaatgatgttgctataaacattcatgtacatgtttctgtgtggacatgtgttttca

SEQ ID NO: 16170 - DNA, 201 bp, Homo sapiens
cagtgtatgagggttacagtttttctatatccttgctaacccttgtgggtaagaagtgatatctcactgtggttttgacttgcgttttcctaatgactaargatactgagcatcttttcatgtgcttaatgatcatttgtatatattatttagataaatgtgtattcatttcctttgcctagttttaaatttggttatttg

SEQ ID NO: 16171 - DNA, 201 bp, Homo sapiens
tggatgacaacctgccagatttgttgaacctatgaaggttctctgattctctggaagacctctttctccctgcacatgtaaaaatcctccctactgttcartattcagtccataccccacttccttttttgggtaccacagcttaaaatcatcttttctatctctacctttcttatcattttaagagcaggttagcattta

SEQ ID NO: 16172 - DNA, 201 bp, Homo sapiens
atgtacatgacagggattcattgaccagtgggttttcccatggagtaactgtgctgagagttgaccattttgttaggagacttcctcaactgttaggttckatgagtattttctcctgagctggtctggtataagcctgatgtctagtgttcttggagccaagaattggtgggtcaggggatggagtgggaggaggatggt

SEQ ID NO: 16173 - DNA, 201 bp, Homo sapiens
gaaaaaaaaatttagacaatctgctccacaaatctcaaatagtatgggcagatacgagtttacaaagtgaagaggagaaaacatctataaccaaatctaaygttttttcttttaccatcgataggatttctaagctccctattctatttcttctccaccaaatccagaatacatttggtgtagaaactgttttgcttttta

SEQ ID NO: 16174 - DNA, 201 bp, Homo sapiens
ggctgagtgatgtcaggctaagctgttatttgatgtgaacatcagtttctaataactaaaaaatggtttgttgtgatatttaaatgaactatccataattytgtttcttttttcttcttttgaagaattttgattttcagttttaacatcaaggaaccaagggcaaaacttaacagcataatgttgggttttacagtgtgc

SEQ ID NO: 16175 - DNA, 201 bp, Homo sapiens
aaatagagaaaatgtaaggtatgatcctaatttcttaaagacctgacagtaagaaatggaagtatccattcatatatttaatttcagtgatgttagaaatyccatattctttgaagctaagtaagtggtatagataataagtacaaataagaaactggaggaaggagattcctccaagaactaatagcaagaaataaaatt

SEQ ID NO: 16176 - DNA, 201 bp, Homo sapiens
tttgttaattttctaccttgttgatctgtctaatactgtcatgggagtgttgaagtctcttcctattatcatgtgggagtctatgtctctttgtaagtctytaagaacttcctttatgaatctgggtgctcctgtgttgggtgcatatatgtttaggatagtcttcttgttgaattgaatccttcaccattatgtaatgcc

SEQ ID NO: 16177 - DNA, 201 bp, Homo sapiens
acaggagaaagaattttttttgttgtttatctagaagtcggaagagagaaagccattgattagggaagatggaaaaggctctttaaagctattctttaccrgaaatgtattagcagagaccgactgaacagtcatctgggataattgcagaaggtgaaagttgggctttaagtatctttatttcacccattaatatttaat

SEQ ID NO: 16178 - DNA, 201 bp, Homo sapiens
aaggtgttattgggcagcctcattagtaacattagctgcattttaacagggtcttcctggatttaaagagatagctcaagtgagtgactctaaatgaaggmattttgagcatctctgaagggcagtggaggagggagttggtgttccttctccctatctacataatagtcaatgtcaaatgcagacataatgtttgaaatt

SEQ ID NO: 16179 - DNA, 201 bp, Homo sapiens
agagaaataagctatgcaatcaaaaacatacatggtatcaggcaagtgattcacatttttcttgtcatctgttcaagctaccaaaagaaaattaatgtttrtaaatggctaggaaactcgtcttttcatcattgaatagggtagaatacagaggtgggagtaagaaacaggaaatcctactttggggtttaatggtaactt

SEQ ID NO: 16180 - DNA, 201 bp, Homo sapiens
gattgggaactatctgtaatatagttgtcctggaatggataaattgtataatctagaaactctactattttagtgtataaaaagtgaagctcactcgctgytccacaaagggcaaggaattgattttggaatctttcagaaataggaatctaaattgagaacaccatttctattgtagcatttctttttattgctgcgaaa

SEQ ID NO: 16181 - DNA, 201 bp, Homo sapiens
attgcatgattctctttccctgaccctcactttgttatagatgttgtgtgtttgcctacagggaatggttgtggaaagtactgagtgggaattgctttcawgaagggcagacatactgtcttctatcattcctaatacggtggtttagaaagagtatatttctttggctgattttccccatgttgtcttaaacaaataaac

SEQ ID NO: 16182 - DNA, 201 bp, Homo sapiens
ggaaaaaatcctagctggtagtaatgcctgggtctttaaatttttcattaagttccgtttcctaatatatatttttaggagtttcacatttctattcatgrgtgagattggtttaaagcgatatattgaaaagtttgttccttttaatactagccccaggagaagctcaagggggaaaaaaagattcaaaggtgaagtaag

SEQ ID NO: 16183 - DNA, 201 bp, Homo sapiens
gttttataggaggtcacgtgcacaggacctaaaggcagtggaaataataaatgataaaagtgtttgaattttgtatatttttcttatatatttaccttatstttggcattgtgttaagcaagctcttcacatatataatccatttttcattataataagcctcaagttgatattataatccccattttataggtaggttaa

SEQ ID NO: 16184 - DNA, 201 bp, Homo sapiens
cacatatataatccatttttcattataataagcctcaagttgatattataatccccattttataggtaggttaacagattcagaaaggttgcctcaggcartgtcacataagataataaatggcacaaaatggatttgagcaggtgttcatggtctttaatatatcctgaattttactcatcttacattagcaaatattta

SEQ ID NO: 16185 - DNA, 201 bp, Homo sapiens
ctagtagtgtattggaaagagatggatatttctgttaatgatatagtataacaaatgagatttctcatgatcctaattttctagatttctaggactctaamcagccttaacgtttgtataagtaatcagaaatactttgcaaaaactcatattttgcagatcaggctcacttgggtagtgaaaagacaatctttagaggat

SEQ ID NO: 16186 - DNA, 201 bp, Homo sapiens
caagtcatggtttcataaattatacccattttaaattcactagacaagtttactatttaaaaaaatgtggaatgcatctgttggaaacatacatttaagaycctcccaaaaaatgactaattaacatatgaaaaaaagttttcatttcactggcaaccagaaattgtaaaataaaacagccatccagatatcatgattggg

SEQ ID NO: 16187 - DNA, 201 bp, Homo sapiens
ttcccccttctctatttattatttattactataccccaaaagtcatacacaacaaagatggaaatcctcaaagacacagaaaagtagagatgtcagtcaaygtttgcaagactcatagattgaactggattgaaaatctatcagtgaccagtgaatgctttgccctgattaagaaaaatgaggccaaacaagaagacaacc

SEQ ID NO: 16188 - DNA, 201 bp, Homo sapiens
gcctctatgtttcttcactacatcaacttgagaaacgtgggcactgtgacaaccagaaatccagagaggcaactttgaactataaggccaactcaaaaaaygaatccaagtaagaatttacaacggggaagtccaggtagaagatgcctgatggtaaatatttattcaagataaacatgtagagttccatctaataaatgc

SEQ ID NO: 16189 - DNA, 201 bp, Homo sapiens
tttataatttatctagatgaataccaaccttcttttctaaatgatgagcatatttaaggttatacattttcctacagcctttgctcctttggatatgaagygtttatatctttattgctttctaaataatttttacttttggtttcttctgtcatacaaggtttatctgggagtatgtttctcacatttttcttttatact

SEQ ID NO: 16190 - DNA, 201 bp, Homo sapiens
ctcacatttttcttttatacttttttattagaacttcatatgcctcagttgtatcttttctcattaattccacctgattgtacttttgatgtacatatttktgtctttctaaatctcagggaaagcttctttttaaaaaaatatgtcttttataattgtttttctccttctatcttccttttctttttttctggaactcct

SEQ ID NO: 16191 - DNA, 201 bp, Homo sapiens
tatttctaggggggtttcagggctgaccacatctctggggttatactaaaatgtaacagagtttcaggaatacaggattgaggacttgcaccaaaatgtcrtcctctctgctgttattttaactcacacatagacctctttatgccattgcatgctatacttgtcatcctatacctgtctgacacctaaaacaatgaacct

SEQ ID NO: 16192 - DNA, 201 bp, Homo sapiens
tgtgtgaaagagtgataccctgtctcagaaacaaaaacaaaaactttcaatgaatctcttatgagggaaaaactgtcctagaaaatcaaagttatccatckcccagtaaactggctggatttttatgtatccatagctctacatcaaaaagacaaagaaatattttctatttttaattagaatactcaattttaagcaaat

SEQ ID NO: 16193 - DNA, 201 bp, Homo sapiens
gggaaggaaattatttttaggtagttattcctaatttagaaagacttgatgaagtcagaataacctaataacagatgcctccgtctgtgtaaatttttagratgtctaagtagtgtgattttgctttcatgtcaataaaccattgagtctacaaatcagtcaattgctaccctaataatgaaacatttatgtgtcatgcat

SEQ ID NO: 16194 - DNA, 201 bp, Homo sapiens
ggtctacagctcccagcgtgagcaacgcagaagacgggtgatttctgcatttccatctgaggtagcaggttcatctcactagggagtgccagacagtgggygcaggtcagtgggtgcagcacgcggtgcacgagccgaagcagggcgaggcattgcctcactcaggaagtgcaaggggtcaaggagttccctttcctggtc

SEQ ID NO: 16195 - DNA, 201 bp, Homo sapiens
agtcaattgcaaaaaaaggtgtaatataaccagaaaagattctgtaaataataattaaaataattgatgaggtaagagaattatcttttatgaaaatagcraaagcattaggattcttcattatgaaaagatgagatgtgttttcaagtgttaatgtcattgaattatgtgactgtgattttcccccaaattgaaaactac

SEQ ID NO: 16196 - DNA, 201 bp, Homo sapiens
ttgtccgttgctcatcctcgccgctcattctgtctacctccttctttgatcttcctttctcagttaattacatcatctggaaatatggccttgtgaactawtcactttctccaggaacatttccattttaataataatcactaccagtcaccatgctaaatgctttgcatgcattatttcaaattcttaaaacaaccctct

SEQ ID NO: 16197 - DNA, 201 bp, Homo sapiens
atagggataatcttaaatatattctaattatttgtatgtccattctttgaaaattttaactgttattagtaaaatttttaaatttttaaattaaaattagyaaaataattgtcctgtagctcagttgactaaatccactggactaaatgatgtttaataaatatccttttcagctacattaaatgcttctagaaatagtgg

SEQ ID NO: 16198 - DNA, 201 bp, Homo sapiens
tctcaacctccccggcctcacaagatgaggcagctttattcctattcaaggctagacccttctctttgctgttcatgttatccactcctatctttgtcctygtatcctctttattgtatcgccaatctcttactctctacttattattattattattattattattattattattattattgaggcagagtctctctctgt

SEQ ID NO: 16199 - DNA, 201 bp, Homo sapiens
cctattcaaggctagacccttctctttgctgttcatgttatccactcctatctttgtccttgtatcctctttattgtatcgccaatctcttactctctacwtattattattattattattattattattattattattattgaggcagagtctctctctgttgcccaggcgggagtacagtggtgcgatcttggctcactg

SEQ ID NO: 16200 - DNA, 201 bp, Homo sapiens
cgccagcatgctgggctaattttttgtattttttgtagagatagggtttcaccatgttatccaggatggtctcgatcccctgacctcgtgatacacccacytcagcctcccaaagtgctaggattacaggtgtcagcaccgtgctcggccctctctactaattatgaatcaataaacatgctcaattgttgcccatgctaa

SEQ ID NO: 16201 - DNA, 201 bp, Homo sapiens
tatactatgcaattttgagacaccagtggttctctttcagtgagattaagcttggaatgtttgtttaaaaaggcactattattttcttatagattttaaaktttacaatattcgcccaaatttctttttctttttgtttatttctttgctgtaaccatatgtttgcttacctgaagaaatggaggtaggcatcaaagttga

SEQ ID NO: 16202 - DNA, 201 bp, Homo sapiens
ttgagcagagactgagatgatgagctgtgcagaagattttgctgaagaatattccaggtagagggaacagtaagtataaaaaccctggagatgggatccawcaggaagtctgtggctgtaacataggaacagtgggggagaaaggagataaaatcagaggtaccagtagatgggggccttatcagtccctacccaatggtt

SEQ ID NO: 16203 - DNA, 201 bp, Homo sapiens
taagtataaaaaccctggagatgggatccaacaggaagtctgtggctgtaacataggaacagtgggggagaaaggagataaaatcagaggtaccagtagawgggggccttatcagtccctacccaatggtttggattttattacaaggataactgaaaatgattggagtgttccaacaggttgtgacatgattggattgat

SEQ ID NO: 16204 - DNA, 201 bp, Homo sapiens
ctttatgttttaaggaaaaatattgaaaatgttatcctggagtgcctcaccttaggatgactctgctgccgtcctagctttccctttggagtctgaaggaygggtgtagtctccttaatgttctggctaggtcattgtctcattctgggagctgtcaagcactctcctgagccttgcagggtccagtagaataattccata

SEQ ID NO: 16205 - DNA, 201 bp, Homo sapiens
aattaaatatacattaaatgaaagcaaattttgaaatgtaatcatttctagagtaaaaaaaaaaaaaaaacccagaaaatttgagaaaaacattaccaaartaccttgttagctatttttcctcttcagtaattgtatcaattagaaaaaatatatttcttgaaaaaatgagctcctctaagttactttttttagttttct

SEQ ID NO: 16206 - DNA, 201 bp, Homo sapiens; identical to SEQ ID NO: 16205

SEQ ID NO: 16207 - DNA, 201 bp, Homo sapiens
tttcttatgtaaaagaaactatatagatttttaacatctcatttgttctactaaaaataattaatatggaactctccaagtcacaatagaaaatgaaaggwtaactttactatatcatctaagtgaaagtagctaaatttctccttgctgtttatattttaactaataatcatgaatatatgagaatacttaatgttttct

SEQ ID NO: 16208 - DNA, 201 bp, Homo sapiens; identical to SEQ ID NO: 16207

SEQ ID NO: 16209 - DNA, 201 bp, Homo sapiens
aaacaacttgttcccctaccgaattcttatagtgcttatatttcctgttgttaaaatgccaattaattatctgctgcgctttcacagttttgtactaagaygttacctgtactgttattttatgtatttaaacttttttttcctagataaaatataagctaattgaaggcaggaacaatatatttgtattttttttttttt

SEQ ID NO: 16210 - DNA, 201 bp, Homo sapiens
ctgcctgcttacaccctcaaaagctgacaagcatcatctgaatgctatgtgctatgagctcccgttgaattccatgttacaatcagactttaaaatgaggrctggttcccttggacaagagaatcatggtgtcctcaggtcactgacaattttagaatattgactcctgatgtcttttggcatcaccagtattttatttcc

SEQ ID NO: 16211 - DNA, 201 bp, Homo sapiens
ttcaggtgagatgtaaaagtaaacatccagttatgtcattcttttattttttcactcactccatgaacatttatcagacgcctgtgatgttagactctgtsctggagatactaaggtagaaaatacaaactttataccttcaaggagtttgcttgggatgactaaggggcaaaaacaattgttaagaagaaagatagtgat

SEQ ID NO: 16212 - DNA, 201 bp, Homo sapiens
tgggtttgcactcctgtgagaatctaatactgctgctgatctgacaggaggcagagctcaggtggtaattcaagtgatagagagcagctataaatatgtayggcctggttcttaacaggccaaggactggtactgcgttcgtggttcaggggttgggaacctctgccatagagtattgtgaggattaaacaagataatact

SEQ ID NO: 16213 - DNA, 201 bp, Homo sapiens
agtggaaaagacagacctagagaacatccaggatcgcctgtccagaacagacagtgtgcagtgagaagagagggaaacaaggttgaataaatgagtgagatggatgatggaggccttgaaacctaggcagaggacttttggtttctactgattagaaagatgtttctagtcaatagaagcaaaccaatgaaaaaatctaaa

SEQ ID NO: 16214 - DNA, 201 bp, Homo sapiens
taaatgtattatcttcagaaaaagcatttttacttgaaaataagtttgtgtttctgctacagcaagttcatctcacattgagttattgtccaagactgccrtggtaaatatagtctgctccacctagaactgaacttattttcatatggattggtcctcctcagaaatttagcatgtgtataaacatgtttctttagcttt

SEQ ID NO: 16215 - DNA, 201 bp, Homo sapiens
ctcacattgagttattgtccaagactgccgtggtaaatatagtctgctccacctagaactgaacttattttcatatggattggtcctcctcagaaatttascatgtgtataaacatgtttctttagctttcaaatgtgaatgagatccagtgctaagttgattttcatgaaatctatcttaagaagtagatgatgtgacta

SEQ ID NO: 16216 - DNA, 201 bp, Homo sapiens
gtagaaatatcagagtgtatttacacaaacctaggtggtagagcctgctatatacctaggctatatggtatatagcccattgcccctaggctataaacccrtacagcatgttactctactgaatactgtaggcagttgtaacacaatggtatttgtgtatctaaacgtgcctaacaaagaaaaactacagtaaaaatacag

SEQ ID NO: 16217 - DNA, 201 bp, Homo sapiens
ggcatcagacatggtaaccctagggtggtcaaaagtggctgggctacactgcagttcttctagtcatttgtttcaaagcccaaagcaagcatgcctcctgwttatactaatggcacatgtaaccctttttgtcctgaggctgagtacttggcacaaacacaagctggtcattttaaccaagagtacaatgtagtctggaga

SEQ ID NO: 16218 - DNA, 201 bp, Homo sapiens
aatatgaatacatttgccatcatagtgatcacatcatatataggtactacagatatatacaagttttttgaattccaggaacaaatgtgcactgccaattygattatctctagctataggtatcaagttaggattagacctggatcccctgaagacaagtaatccaacgtgggttttaatctgtttttgaattctaagtat

SEQ ID NO: 16219 - DNA, 201 bp, Homo sapiens
ttgaattccaggaacaaatgtgcactgccaatttgattatctctagctataggtatcaagttaggattagacctggatcccctgaagacaagtaatccaaygtgggttttaatctgtttttgaattctaagtatctagcgcaagcaaggtgcctagaacatagtatacaataaaaagtgtttgcagaattaattatatgaa

SEQ ID NO: 16220 - DNA, 201 bp, Homo sapiens
aaacccgaagattatcaaggggtttcttggtaaaagattatcaagaaggggtttctactatgttgtaagaggtgaaacttggcatacattttaagacgaamatggtccttttgcatttgaattttcaaaggtgcaaataattataagtcagggatggtgaaaatagtagtagtctttggatatatacattagcttttttct

SEQ ID NO: 16221 - DNA, 201 bp, Homo sapiens
acttggttgttaaccctgtgtcagttgctgtttttttttttaactttgtaatgatgaaatgcagtttccattctcctgaccaccttaaggtagtaccaatygtgggtaaaataatatagaagagatataatataaaaggggaaataatttagaaggacaatgctgtcccccccttttgaagatgacatggatttagagcaa

SEQ ID NO: 16222 - DNA, 201 bp, Homo sapiens
ccaatcgtgggtaaaataatatagaagagatataatataaaaggggaaataatttagaaggacaatgctgtcccccccttttgaagatgacatggatttaragcaaagttttggttatttttgagaggtccagaatccaggcatctgcctcttttgatacaaaggctgctacttcttgcttcttcaagggacttctcaccc

SEQ ID NO: 16223 - DNA, 201 bp, Homo sapiens
actgcaggtacaatttggtgccactgctgtcttgtgctaaggcaccagcagttttacccaccttttcttctgcaccatcagtgcaaacgtcaacatagtgraaaaggcaaataagaagttaatattattatgagatagtcttcctatgggccttttatctgggtaccctaaaaagatcttgctgacacccaggagctgttg

SEQ ID NO: 16224 - DNA, 201 bp, Homo sapiens
attttcttgaaaatatctgataattcaatttataatttattcttaacactctctttaaaaaaaaaagaaagaaaacttaaagtataataataataaaattwaaaaaaaaaaaaagaaaagtaagggaccagatcaggggtagaacaaagctgcagacatatatttttcaaacctgctgtcaaggaaatcagaggcataaga

SEQ ID NO: 16225 - DNA, 201 bp, Homo sapiens
atcaatggaatctttcttaataaaacaatgttctcactataattatagtccacaagcactatgagccacatagtggcatttaagatgctctcaccttcttyagcctccttacacctcactcttagagcatcactactatcccttaaaatatggaaaggtggagaaatctttctgagcttgggcacttccactaactcttat

SEQ ID NO: 16226 - DNA, 201 bp, Homo sapiens
cttcagcctccttacacctcactcttagagcatcactactatcccttaaaatatggaaaggtggagaaatctttctgagcttgggcacttccactaactcttattttgctgctggtccctgtccctttgaggagcaacagcactaaaaagctactttcagagatccaaaaacaacatggttcgtggaaagccatgtattgg

SEQ ID NO: 16227 - DNA, 201 bp, Homo sapiens
gactggaggcctcttttccattagagatgtgtttcctcatagacttttgtcttcacactttattttcttgtgcccactgcctcttattcgatcatttgttrtttctattctcaaactctctttcttcttctcctaattttgtttctgaaaatttagcctgtatcttacaatctactatataccaggcagtgctccactctc

SEQ ID NO: 16228 - DNA, 201 bp, Homo sapiens
tttattttcttgtgcccactgcctcttattcgatcatttgttgtttctattctcaaactctctttcttcttctcctaattttgtttctgaaaatttagcckgtatcttacaatctactatataccaggcagtgctccactctctccttacttttttaactacagcctatcaaccaaagtttattctatggttgacttcctc

SEQ ID NO: 16229 - DNA, 201 bp, Homo sapiens
atatagtgttatggatcagaatatctaaagagaaattaaaagaaatttctctttgaagtagaggtaaagagggttggagcgggagacttgcttctcatcayaccttcttcaaaactatgaactgttatcatgtgcatgcattattaatactttagttttaaaaattaaattaattatttcaacaaacttgccttgagttta

SEQ ID NO: 16230 - DNA, 201 bp, Homo sapiens
ttatagcattatatacagagaagacagtgactactattttccagctaagagagtgtacatctaggtgtgtatgagggtaatgggcctggtgaactgtaggrgagggaagaggaaagtcagtcaagggagccttcacagaggtgctggacctttttagaacgcaaaagactcaatctgagaggcgtcagagggagacagaca

SEQ ID NO: 16231 - DNA, 201 bp, Homo sapiens
ttcaaacatcttgagcaacaggatctttgtttctgacgaaaactcatgtagaagccacatgtgaagagttaagtgcagacttggtctaagtgaaacaggtraaagaaacatggccacttgctttagctagaatcactacctaaactatggtattcacatcatcaagaatgtacacgatggatatatgatccaagctcttgc

SEQ ID NO: 16232 - DNA, 201 bp, Homo sapiens
gaagagttaagtgcagacttggtctaagtgaaacaggtgaaagaaacatggccacttgctttagctagaatcactacctaaactatggtattcacatcatmaagaatgtacacgatggatatatgatccaagctcttgcttttctcctgcctcctcaaggtggtccctgaagaaattctgaacagattttctcaaagttgc

SEQ ID NO: 16233 - DNA, 201 bp, Homo sapiens
tttcaaagtgatccaggtccttttaccaccagagaggaagaaagaggattaagctgaaattaatgttttgatgaagatgaggtggatggtaaattgacccragggaagcaaaaaaaaatcaacttgccacatgttagcaaccgagacctcatgattgatgttcagtgacttggaaattctctccagggcaaactgcatttt

SEQ ID NO: 16234 - DNA, 201 bp, Homo sapiens
tgccagttaatattccagccaatggtgtataaaaatatccatttcctcacatctggtcatagtggatattattagtctaatatacaagttcacacacatgwgtaattttaatgtgcatttctttggttattactgaagtttagtaacatgttttatttagcatttgtctttcattatctgagaactactaatactctcctt

SEQ ID NO: 16235 - DNA, 201 bp, Homo sapiens
ttatatcactgtataatttaaggagaatttagaactttaaatattgagatttctatccaagatctgtttctctatttcagctttgttatatatccctcagmataattttataaatgtattcatataagactgcacattttctggtaggtttatgaccagatgttttttagtagataccctacgttcatttaatggttgatt

SEQ ID NO: 16236 - DNA, 201 bp, Homo sapiens
acacgcacgccacacacacacacacatacatacatgtgtgcttcttggggtcctagaatttctagcttctcctcactgagaaactggtgaggagaatgctscttctgtcactgtccaaattgtgctgattcttctttgtgtatgccaccctgttctcttcttctgctggtctttgctaggacagtgtattgacatagaagt

SEQ ID NO: 16237 - DNA, 201 bp, Homo sapiens
cacacacacacacacatacatacatgtgtgcttcttggggtcctagaatttctagcttctcctcactgagaaactggtgaggagaatgctccttctgtcaytgtccaaattgtgctgattcttctttgtgtatgccaccctgttctcttcttctgctggtctttgctaggacagtgtattgacatagaagttcattatttc

SEQ ID NO: 16238 - DNA, 201 bp, Homo sapiens
gtgttactgaagggttttattttttaattctttcactaggggagtcaaaactattacttcctgcttaacctataactctgatgatggctttgccatgttgwcatggttttttgtttgtttgtttggcctatattctgagaattctgtgtatcttggctctgccccatgtgagaatgagcgagatttattatttcatgggga

SEQ ID NO: 16239 - DNA, 201 bp, Homo sapiens
ctctattatcagtttctttttaaattttttaagtgttattttgttttttacacatagtagttgtatatactatggggtgtaatgtgatgtttccatacacrtatacattgcataatgttcaaatcggggtaattagtatatccatcacctcaaacatttatcatttctttatagtgggtacattcaaaatcctctaactat

SEQ ID NO: 16240 - DNA, 201 bp, Homo sapiens
acacctactgtgtgtcaggcactgttttaagagctagaaaaaagccataaagcaaacaaagattcctgtgcttgaggaactcaggttttaactggggagayggataagcaatacccaaagtaaataagtaaattatgtggcagattacaagattattagggccatggaccaaaggaaaggcaaagcagggtaagggggatc

SEQ ID NO: 16241 - DNA, 201 bp, Homo sapiens
agctgaagtatatattagagtacattatttagtaaacggtagacagttctttccttgaaactcatttgaacatttattgtaatgtgaactaagttttttcmattcctaattagagatggtagtttttctgtattttaaaattggatatcacatccatgtacatatatacaaacacacataaatttctcagatattaaaatg

SEQ ID NO: 16242 - DNA, 201 bp, Homo sapiens
tattccttgaaatgaaattaattgtggcattggtacaagtcaaaataattcagtgttttggtagtggtagtatctgtgatagtcttaggcttagatattgyagtgacaaagtatccagtggtagagttgatgaaattgtatttttatagacgtatttgaggctattatgcttttatcatcaaaatataatattcatatagt

SEQ ID NO: 16243 - DNA, 201 bp, Homo sapiens
tgtccttctaattctggcatgttgagaatctgaacatgtgaaatacttgtgttctattttatggttatggaaagtaagatttttttcatctgtgggcccamattattttttctatttactgacttaaatgatgcagagaagagtctagtatgaaactggaaaaagttaacaatgaaaacctaaatcacagaactttgtttt

SEQ ID NO: 16244 - DNA, 201 bp, Homo sapiens
ggcacagtggactgcgtgccaggggcattgcttccattattactcctaggaagctaggaactaaaaaagcctgcatgtcaactgctggtttcaaatcacascaccctagccacaaccaggagtcacgaagcaactgttgtcttctgggatattctactttagctgtgattcagggatcagactgctaccagcattgttagc

SEQ ID NO: 16245 - DNA, 201 bp, Homo sapiens
gcatttaattgggattattttttggcacagcgatcattaattagagcaaatggagcataagcaacgttagttgaataaataatgaatttaaagagtctatraaggttaaatagcatactctggaatgttctatgaagtaatttttcctttccatgctacatactgtcaagataactagtctaacccaaggttagatagaaa

SEQ ID NO: 16246 - DNA, 201 bp, Homo sapiens
agagtgtttcctgcaatattttcatgaaaaatatatgtgtaaaaatgtctaggatggtctaagagaaaatatttatattgattactgtgaattagaatagwttttttggtttgtttatattaaaaacatttaatcccatgagcacatcatcttatcagaaaatgattccaaaaagttcttctgtgagttttatcaaccagg

SEQ ID NO: 16247 - DNA, 201 bp, Homo sapiens
taagttgtattcacattatattgatctatttactttttcagttaattccgtatgaaacatttgtttactaagatatcaaatcaaccacaaattaccattcrtagataaaatggaattaattcttaatgatgtggcctttttaggacatagttaaaattctttaattttgtgattatgttatttagtatacattaagtataa

SEQ ID NO: 16248 - DNA, 201 bp, Homo sapiens
tatttttcttattacaaaaacactgtgactgcatgcagtggctcacctgtataatccctgatagtcaggaggctgaggtggaaggatcatttaatgctagrggtttgagattagcctggacaacagagtgagactccatctctaaaaaaacaaaaaaggaccacacacacacacacacacacacacacacacacacacaca

SEQ ID NO: 16249 - DNA, 201 bp, Homo sapiens
cttgatgtcagggttacatctcaaccatcttttcatctctagatcctatcatgttgcttggcacaaggtagttgcttggggaatggtgaattgatctatayagttatctagtccgtttagcatcccctcaaacttgggtaaactccagggcacaaggagggcattaggcaatgttcttagatgctgagctttaagggagtt

SEQ ID NO: 16250 - DNA, 201 bp, Homo sapiens
ctatggagagaaaatgggtatggcacttggtaaaaaaaaatcgggagattgttttacggaaaaataaaatttcttacctcctaagcaaaacatcaaaacaycaaaattttattttttacggaaaagtaaaattttttacctcctaagcaaaacatcaaaacatacatacttatgttgtacttttatttttctttcaaagaa

SEQ ID NO: 16251 - DNA, 201 bp, Homo sapiens
tgtcaagattgggggtggcctgattagggatctcataaggctgttgacaggagtggaatcttccatgggagcaatagtcagatttgtctcaacttaaattytgggaattttgctaaaataagaatggcttctgagatataatgagctaaacctgaaatgttggttcttgtaaatacatggtaaaggcgtgagattagaatt

SEQ ID NO: 16252 - DNA, 201 bp, Homo sapiens
gatttgtctcaacttaaattctgggaattttgctaaaataagaatggcttctgagatataatgagctaaacctgaaatgttggttcttgtaaatacatggyaaaggcgtgagattagaatttctcttttaggaaacctgtcaaattgttaagctccttttcctcttttatttgtgatctaagtgatttgtctatacagcct

SEQ ID NO: 16253 - DNA, 201 bp, Homo sapiens
tgatttgataataacgtaaaatcgtcaaatacaagggcaggagaaggtagatttattaggtaattgaattactagagatgctattgctgtgagagaaaacycaattacctgtgggctgtggacaaagagcttcctatttcctgatggggatctaaaattgattagcttcaggcttgtagaagtcttctgctattattaata

SEQ ID NO: 16254 - DNA, 201 bp, Homo sapiens
tatattttgagggcagggtctttcttaaaaaatgtcttctgtatactatttaaaagattttccatagttttcatggatgcataaactataaagccaaattmttggcctgtttataagttctttggtttgactttgttattgccagggtatctcagtgtagcaaaataactccattctttatggatctttttctgatgattt

SEQ ID NO: 16255 - DNA, 201 bp, Homo sapiens
taaactataaagccaaattcttggcctgtttataagttctttggtttgactttgttattgccagggtatctcagtgtagcaaaataactccattctttatrgatctttttctgatgatttatgggaaacttaagataaacctttaattaatttatttttttttgtttactttgttgactggataaaattctttcacgtggt

SEQ ID NO: 16256 - DNA, 201 bp, Homo sapiens
acattagtatggtatgtttgttgcaattaatgaaccactacttttacaatattattaattaaaatccatattttattcagatttttgttgtttttagcctrcttgcctttttctatccaggatcatatccaggataccacattacatttcatcatcatgtctctaggctcttcttagatgtgacaatttctcagactttat

SEQ ID NO: 16257 - DNA, 201 bp, Homo sapiens
tctctgatgtttttctcacggagttatgtgtttttgggagaaagatcacagagggaaattaccatcttatcacatcatatcaaaggagcatactgttagtkacttagcactgttgatgttgtccatcatcacctggctctggttatggttgtcaggctttccctttctatcctgtattctttgtaaggaagtcactgtgca

SEQ ID NO: 16258 - DNA, 201 bp, Homo sapiens
cacctggctctggttatggttgtcaggctttccctttctatcctgtattctttgtaaggaagtcactgtgcataacccacacttaaggagtggggagttaygctccatctccagagagtgtattgtattatctacataaattatttggaactcatctgcgtgggagttttgtctattattctccatttgtttatttattca

SEQ ID NO: 16259 - DNA, 201 bp, Homo sapiens
aagtcactgtgcataacccacacttaaggagtggggagttatgctccatctccagagagtgtattgtattatctacataaattatttggaactcatctgcrtgggagttttgtctattattctccatttgtttatttattcaataatttatatcagtatggactcatgaatagtttatactttaggttataatccaatgct

SEQ ID NO: 16260 - DNA, 201 bp, Homo sapiens
gtcttgcagactccactcatttccaaagttacttaggtcaactaccctctccccttaccccttcagtgaggttgtttcatacatttgcaatagagttagaytgtctgttttgtcacattctgcattctattctgggatcctttgatgtccttaattatttttgtttaaattgcatggactaaggtttactttttgtgctgt

SEQ ID NO: 16261 - DNA, 201 bp, Homo sapiens
tatttgccaatacatactaagatagtttgagctatttaattttatattattatattgtattattttatgttatttactagtacaatgcattgtcaaaaccyataaagtaaggttttgaaatagtccaaactattttcaattatttaatatttgactttttttttttgtcttttgagacagggtctcactctttcacccagg

SEQ ID NO: 16262 - DNA, 201 bp, Homo sapiens
tactagtacaatgcattgtcaaaacccataaagtaaggttttgaaatagtccaaactattttcaattatttaatatttgactttttttttttgtcttttgrgacagggtctcactctttcacccaggctggagtgcagtggcttgatcacagttcactgcagccttgatttcctgagctcaagcaatccttccacctcagc

SEQ ID NO: 16263 - DNA, 201 bp, Homo sapiens
ggtgctctggtgttgggagcacacatgaggatacaatcattacaatcattatatcctcttgatgaactgacacctctttcattatataataattttgtcastttttattacttaaagtctgttttatctgttgtaagtatagctactcctactcacttttgagcaccatttacatggaacatctttttccattcctttatt

SEQ ID NO: 16264 - DNA, 201 bp, Homo sapiens
tccccaaaatccctagtgttctgtgttgccttgaaatttatataaacagatgttttgaccatctgggtttaggttaggaaagacatgagtatccacttatwaataatgaagtcaagttattctcattctgtaatgttcaacaatattattcaaaggaattaagtgtcataactatggctcattttgcatctgcagatggag

SEQ ID NO: 16265 - DNA, 201 bp, Homo sapiens
ctgcgaggaaacggaaaggattgttgctaaccacattcgtgagcgagaagggaagacaaaggaccaggtaaagagaggtcttccctggtgggcagggagaytgtgggaggtcgaaggtctctgcaaggttgtctggtagttcccaacagtcagcctgtcgcttaaaggaaaaaaaaatagtggaacacaactacattatgt

SEQ ID NO: 16266 - DNA, 201 bp, Homo sapiens
tctagtagatttttaacttatgaatttagagtgcaaaattatgagtctaataaagaaaagttaaggttacttttcatgctaattgaagtatcctttaaaarattatatgaaggtaattaatttgtgggcaattactgaatttaatgtttgagaatttttagatgggttttcactgaagtgtttctctttgacttataggta

SEQ ID NO: 16267 - DNA, 201 bp, Homo sapiens
aaagaaaagttaaggttacttttcatgctaattgaagtatcctttaaaaaattatatgaaggtaattaatttgtgggcaattactgaatttaatgtttgaraatttttagatgggttttcactgaagtgtttctctttgacttataggtattgctattgattgacattcaagtctcttacatcaacaccaaccatgaagac

SEQ ID NO: 16268 - DNA, 201 bp, Homo sapiens
cccctcatgggacctcctgccacacatcttatttgtgcttgtccttcttttgaacagtatgcctacattttagagaaatcaaataattctagattctgtawtaaggtagcaaatagtgtatgcttataagttataatgctattctcttcatctgctgctcagatttacttttctagtagatttttaacttatgaatttaga

SEQ ID NO: 16269 - DNA, 201 bp, Homo sapiens
tggttcaaactaaaagcatgattttttttttttttaactccaggaatgtatacaaagactatcgcttccttgagctggcatgtgattcccaggaggatgtygacagctggaaggcatctctactaagagctggggtctatcctgacaaatctgtagtaagttggatatatctcttatgtaaaaattattattagctatgct

SEQ ID NO: 16270 - DNA, 201 bp, Homo sapiens
gatacagcactctcgcaggtaagaagatggccccggccgggtgcggtggctcgctcctgtaatcccagcactttgagaggccgaggcgggcggatcacgargtcaggagatcgagaccatcctggcgaacatagtgaaaccctgtctctactaaaaacataaaaaaaattagccgggcgtggtggcgggtgcctgtagtcc

SEQ ID NO: 16271 - DNA, 201 bp, Homo sapiens
attggatactttgacttataattaaagaaacttttataattatggcaaaaatgcatgaatttaagttgtgtcattttggttttatttttgtagaatatgcygagtttctacattgcaaaggaaagaaatttacagattttgatgaagttcgccttgagattgaagcagaaacagatcgcgtgactggaatgaataaaggca

SEQ ID NO: 16272 - DNA, 201 bp, Homo sapiens
tttgtactatgtttaatatttctaaagtattaattgtgattcttagtaactactgtgttctgtgggatgttcatgaaggaagaagagagaatattggatastttgacttataattaaagaaacttttataattatggcaaaaatgcatgaatttaagttgtgtcattttggttttatttttgtagaatatgccgagtttct

SEQ ID NO: 16273 - DNA, 201 bp, Homo sapiens
tttttcctttcccacccggcttacagacatatcgctgaccgaatgggaaccccacacctgcagaaggtccttaatcaggtaaaaatgttctttcaagcaamaagaacaattatgaaatatgtaagtaggtgctggaattcatatttattatttttaagtttatttttttttccaaaacaagacatgcagcttcaatgatag

SEQ ID NO: 16274 - DNA, 201 bp, Homo sapiens
ctcactgttggttagtttcctctggaatagattccatgatccctaaaatatttgtatatctccttataaagtaatatgaaaataaaattaaacatttttcyaatttacctggatatagatatggctataatgtatataaatgtgggcgtgtgtaccagcgcataaactacaatcctgccttcattcagcagagctttataa

SEQ ID NO: 16275 - DNA, 201 bp, Homo sapiens; identical to SEQ ID NO: 16274

SEQ ID NO: 16276 - DNA, 201 bp, Homo sapiens
ttttaacccagtacctagtccaatttatcaatcattcacatgctaaaatgaaaaataattatgaaatttctatgaagtgtagtttggacagaccctgaaayaattttctcttcatgaccacatataatgtttaattttaatacttacacttattacatccaggggtagttttagttgaagatgctcactgttggttagttt

SEQ ID NO: 16277 - DNA, 201 bp, Homo sapiens; identical to SEQ ID NO: 16276

SEQ ID NO: 16278 - DNA, 201 bp, Homo sapiens
agtctgtgtatttttaaaattaccttcttcatttacttaaatgaattcaggttgttttgctgtggtatatccaggcacttgcttatttaaacattttcctrattaaggatcatttatcttttcactgtttcaccgagagtcattagtgctgccatcagttcaaacgctgctttgctctgcactatattaaatcatcagcac

SEQ ID NO: 16279 - DNA, 201 bp, Homo sapiens
ttttaaaattaccttcttcatttacttaaatgaattcaggttgttttgctgtggtatatccaggcacttgcttatttaaacattttcctgattaaggatcrtttatcttttcactgtttcaccgagagtcattagtgctgccatcagttcaaacgctgctttgctctgcactatattaaatcatcagcacaggaaatagca

SEQ ID NO: 16280 - DNA, 201 bp, Homo sapiens
atcagcaacaggtaagcaataaattagaaatgtgggaactatgaattgtattcttttgaccaatggctttctgtgtaacctaaagcaaatcatttcgcccmtttgagttgaagtcagtttcttctaaaactacagtgaggtacctcacagagccatcagagattataataaaagtggctataagccatttagaaaaatata

SEQ ID NO: 16281 - DNA, 201 bp, Homo sapiens
ctataagccatttagaaaaatataaagtactaaacaaatagtctgtgtatttttaaaattaccttcttcatttacttaaatgaattcaggttgttttgctrtggtatatccaggcacttgcttatttaaacattttcctgattaaggatcatttatcttttcactgtttcaccgagagtcattagtgctgccatcagttca

SEQ ID NO: 16282 - DNA, 201 bp, Homo sapiens
attaaggcaagatataaaaattttttgagccagaaaaaccacaacagtttttcaggggaaaaaaaaaatcttgctgaaaacaattgttctattcataaggyttttggacaatttatgtttctgatagatttttaaaacacacttacagtaactatgtgacatatgcacacttcattgttatgttgaacctgcccctaaact

SEQ ID NO: 16283 - DNA, 201 bp, Homo sapiens; identical to SEQ ID NO: 16282

SEQ ID NO: 16284 - DNA, 201 bp, Homo sapiens
ccctttaaaaaacaaatacataaatttatcattgggcattgtgatttttcatggaacagtttttatttttagcaactggctttcaaagcaaggaaagattkttttttaagcataattactaagaatagaaacaactttgaggtgttctttttgattcttaatatttaaggtgtctcatgacatttgaagtctctaaatgtc

SEQ ID NO: 16285 - DNA, 201 bp, Homo sapiens
cccctttaaaaaacaaatacataaatttatcattgggcattgtgatttttcatggaacagtttttatttttagcaactggctttcaaagcaaggaaagatktttttttaagcataattactaagaatagaaacaactttgaggtgttctttttgattcttaatatttaaggtgtctcatgacatttgaagtctctaaatgt

SEQ ID NO: 16286 - DNA, 201 bp, Homo sapiens
cttgaacccaggaggcggaggttgcagtgagctgagattgtgccattgcactccagcctggacgacaaagcgagactgcatctcaaaaaaaaaaaaaaaawtttttttggaggctctgagggagaatgtgtttcctgccttttccactttctagaggctgcctgcatttcttggctcatggtcccctttctccatgcatct

SEQ ID NO: 16287 - DNA, 201 bp, Homo sapiens
ttcatgcaacaatgaattggtagaacttgaaatcacaaaaatatttttgctgaattaacattatataatatacttttaggttatcacaaattcacagttgkgtacttaattactaccatcaaatgaattccttttttattaataatgtctgagagcaatatatctaagataactagactggataggatatctctgttttgg

SEQ ID NO: 16288 - DNA, 201 bp, Homo sapiens
tatttttgctgaattaacattatataatatacttttaggttatcacaaattcacagttgggtacttaattactaccatcaaatgaattccttttttattartaatgtctgagagcaatatatctaagataactagactggataggatatctctgttttggaatttacttatgattaacagttatccaaaaatgcacttgat

SEQ ID NO: 16289 - DNA, 201 bp, Homo sapiens
atataatatacttttaggttatcacaaattcacagttgggtacttaattactaccatcaaatgaattccttttttattaataatgtctgagagcaatatawctaagataactagactggataggatatctctgttttggaatttacttatgattaacagttatccaaaaatgcacttgatttaacttctttaagaatgaag

SEQ ID NO: 16290 - DNA, 201 bp, Homo sapiens
attattattactggggatggaagtttagacagaatttgggtgcctttagaggtgcagtgttctggatgatcaaaggaaaagagcaatttttcctttttttytgagacaaagtctcgctcttgtcgcccaggctggagtgcagtggcgggatctcagctcaatctatcaaattcttactatttaatgcccatttaaaatcct

SEQ ID NO: 16291 - DNA, 201 bp, Homo sapiens
ttactatttaatgcccatttaaaatcctactggtttacatgaaatctttcttggactctcccaaagaaaaattgaaagacctctgcctcccagattcaagygattctcctgcctcagcctcctgaagagctgggattacaggcccccaccagcatgccaggctaatttttttttttttgtggagacggggtttcaccaggc

SEQ ID NO: 16292 - DNA, 201 bp, Homo sapiens
tctgatactctcccttctcccacccttcaccctcaaggaggccccagtgtctattgtttcctttgtgtttatgaattctcatcatttagctcccactaatsagtgagaacaggcaacatttggttgtctgttcctgtgttagtttgctaaacttaatggtctccagctccgtccgtgttcctgcaaagaacatgatctcat

SEQ ID NO: 16293 - DNA, 201 bp, Homo sapiens
gtgtccttatggtagaatgagttatgtttctctgggtatatacccagtaatgggattgttggattgaatggtacttctgcttttagttctttgaggaatcrccatactcctttccgcaatggttgaactaatttacactctcaccaacagtgtataagtgttaccatttctccatatctttgtcagcatctgttgtttttt

SEQ ID NO: 16294 - DNA, 201 bp, Homo sapiens
atcagctggatgacactatggggttttctagatatcaaatcatgtcatctctgcaaacagggatagtttgacttcatttctttctatttggatgccatttmtttctttctcttgcctgaagaagcagtctttcaatttttctttggagagtccaagaaagatttcatgtaaactagtagaatttgaaatgggcattaaata

SEQ ID NO: 16295 - DNA, 201 bp, Homo sapiens
ccccacagtatcttgaatgatagtgttttaggtaccattatggactgaacgtttgtatctcctccacaaattcatgttgaagcccaaaccccaaatataaygatatttggagatagggccaattaggaggtaattaagattaaagaggtcataagggtgaggccctgatcaaataggattagtgtccttataaaaagaggc

SEQ ID NO: 16296 - DNA, 201 bp, Homo sapiens
agtggcagtggaaatggaaagaagtataaagagtctacaaatattttggaagtagagtcataatgacttgctgatggactagatggggaagggaagaatgaaaaacgactctcaagtttttgacttgtgactggattgcagtgttgccatttcctgtagtgggaagactgagaaaaaagttgggagttgaacatctaaggt

SEQ ID NO: 16297 - DNA, 201 bp, Homo sapiens
gggatagggaccttgtttcctattctgttgtatctctccatggcagttaataaggtactttgtacaaattgaagagacagaaaatattaaaattcctttctttttttttttttagaaatttggaaaacctcaaatctgttgagaaattggatttttggaaatttattcataaaaaattattgtagctgaaacttacctctc

SEQ ID NO: 16298 - DNA, 201 bp, Homo sapiens
gagattagcctggacaacagagtgagactccatctctaaaaaaacaaaaaaggaccacacacacacacacacacacacacacacacacacacacacacacmccgtcagaatgaataccatcaatctataaactgcatttgattcctctttttcttttttctttctttttttttttgagatggagtctcactctgttgctaa

SEQ ID NO: 16299 - DNA, 201 bp, Homo sapiens
gattagcctggacaacagagtgagactccatctctaaaaaaacaaaaaaggaccacacacacacacacacacacacacacacacacacacacacacacacygtcagaatgaataccatcaatctataaactgcatttgattcctctttttcttttttctttctttttttttttgagatggagtctcactctgttgctaagg

SEQ ID NO: 16300 - DNA, 201 bp, Homo sapiens
gattgtgactcatgaggatggtacataagaagaaaatgaaattctgattatttacttacgaatgattttttggtttctttttgagacagggcctctctctstctctcactcaggctggattgcagtggtgcaatcacggcacactgtagcctcaacctgcctggctcaagtgatcctctcacctcagcctcctgagtagct

SEQ ID NO: 16301 - DNA, 201 bp, Homo sapiens
taaattgcatggactaaggtttactttttgtgctgtaaagtttcataggttttgacaatgccttgtgccatgtatttgccaatacatactaagatagtttgagctatttaattttatattattatattgtattattttatgttatttactagtacaatgcattgtcaaaacccataaagtaaggttttgaaatagtccaaa

SEQ ID NO: 16302 - DNA, 201 bp, Homo sapiens
agtttgagctatttaattttatattattatattgtattattttatgttatttactagtacaatgcattgtcaaaacccataaagtaaggttttgaaatagwccaaactattttcaattatttaatatttgactttttttttttgtcttttgagacagggtctcactctttcacccaggctggagtgcagtggcttgatcac

SEQ ID NO: 16303 - DNA, 201 bp, Homo sapiens
tgtattattttatgttatttactagtacaatgcattgtcaaaacccataaagtaaggttttgaaatagtccaaactattttcaattatttaatatttgactttttttttttgtcttttgagacagggtctcactctttcacccaggctggagtgcagtggcttgatcacagttcactgcagccttgatttcctgagctcaa

SEQ ID NO: 16304 - DNA, 201 bp, Homo sapiens
tctcagcactttgggaggctgtggtgggtggatctcttgagcccaggagtttaagaccatcctgggcaacatggtgaaaccccgtctcctcaaaaaatagaaaaaaaaaaaaagccagcgtggtgtcacgcacctgtagtcccagctactcgggaggctgaggtggatcacctgagcccaggagatagaggttgcagtgag

SEQ ID NO: 16305 - DNA, 201 bp, Homo sapiens
ccatcgtgtatatgtgccacattttcttaatccagtctatcattgatggacatttgggttggttccaagtctttgctattgtgaatagtgctgcaataaayatacgtgtgcatgtgtctttatagtagtatgatttataatcctttgggtatatacccagtaatgggatcactgggtgaaatggcatttctagttctagat

SEQ ID NO: 16306 - DNA, 201 bp, Homo sapiens
ttgagatgagataatcctggatttagggtagaccctaaaatccaataactgatatctttataagagaaaagagagagatttaagacagagagagacaagayagaaggccatgtgaagatggaggcagagattggagttatgttgccacagccaaagaatgctaggagtcaccagaagttggcagaggcaaggaagaaccct

SEQ ID NO: 16307 - DNA, 201 bp, Homo sapiens
cccattttaaagtcagatggtttgtttgtcagctattgagttgtttgagttccttgtatattctggatattaccatcttgtcagatgcacagtttgcaaattttttttttctattttgtaggttgtctctttctctgttgtttcctccggtatgcagaagttttttagtgtgatgtaatttcatttgtctgtttttgcttt

SEQ ID NO: 16308 - DNA, 201 bp, Homo sapiens
gtcagatggtttgtttgtcagctattgagttgtttgagttccttgtatattctggatattaccatcttgtcagatgcacagtttgcaaattttttttttcyattttgtaggttgtctctttctctgttgtttcctccggtatgcagaagttttttagtgtgatgtaatttcatttgtctgtttttgcttttgttgcctgta

SEQ ID NO: 16309 - DNA, 201 bp, Homo sapiens
tctctcttttttccctctctgctattatggctatttttttttttttttttttttttggtcactggtgtcagcaatttaattatggtgtgccttggtatgttttgtgtgtgtgtgtgtgtgtgtgtgtgtgtgtgtgtgtgtagctgatgttctttgagctttagaatctgtgagtttgtagttttcatcaattattttttc

SEQ ID NO: 16310 - DNA, 201 bp, Homo sapiens
ctcttttttccctctctgctattatggctatttttttttttttttttttttttggtcactggtgtcagcaatttaattatggtgtgccttggtatgttttgtgtgtgtgtgtgtgtgtgtgtgtgtgtgtgtgtgtgtagctgatgttctttgagctttagaatctgtgagtttgtagttttcatcaattattttttcttt

SEQ ID NO: 16311 - DNA, 201 bp, Homo sapiens
cttttttccctctctgctattatggctatttttttttttttttttttttttggtcactggtgtcagcaatttaattatggtgtgccttggtatgttttgtgtgtgtgtgtgtgtgtgtgtgtgtgtgtgtgtgtgtagctgatgttctttgagctttagaatctgtgagtttgtagttttcatcaattattttttcttttc

SEQ ID NO: 16312 - DNA, 201 bp, Homo sapiens
tagaatctgtgagtttgtagttttcatcaattattttttcttttcattccttttatttactcatgttcgtgttttattttatatttttaagaattttgtgygtatttgtaataactgtttaaatgtcatttgtgaattccattgcttctaggtaggattctattgacagatattttttccctgacgagaggtcatactttc

SEQ ID NO: 16313 - DNA, 201 bp, Homo sapiens
ggtttctgctcttgggtgtctgctctgttgagttgtgattctctatattcacctgtctctccaaattttgggaacagctaattgtctgtgatttcacttcwctgacagatctaagaagggttggtttttcagtttgttcagatttttacttgttgggatggaatgatttccaagctccctacatgccagataggagtcctg

SEQ ID NO: 16314 - DNA, 201 bp, Homo sapiens
aggagaatcgctggaacccgggaggcagaggtggcagtgagctgagattgtgccactgcactacagcctgggtgacagagcaagactctgtctcaagaaamacacacacacacacacacacacacacacacagagagagagaaattggatacagagtcaggacccatccatgtgctgtattcaggagatccatcgtatgtg

SEQ ID NO: 16315 - DNA, 201 bp, Homo sapiens
tggcagtgagctgagattgtgccactgcactacagcctgggtgacagagcaagactctgtctcaagaaacacacacacacacacacacacacacacacacrgagagagagaaattggatacagagtcaggacccatccatgtgctgtattcaggagatccatcgtatgtgcaaagacacacatagactcaaaataaaggga

SEQ ID NO: 16316 - DNA, 201 bp, Homo sapiens
gcacccaatacaggagcatccagaattcataaagcaagttcctagagacctacaaagagacttggacttccacataataatagtgggatactttaacaccytactgccaatattaggtcaacgagacagaaaattaacaaggatattcaagacttgaattcagctctggaccaagaggacctaagacatctacagaactct

SEQ ID NO: 16317 - DNA, 201 bp, Homo sapiens
agaggaagtgaaattatccctgtttgcagatgacatgattatatatttagaaaaccccatcgtctcagcctgaaatctccttaagctgataagcaacttcygcaaagtctcaggatacaaaatcaatgtgcaaaaatcacaagcattcctatacaccaataagagacaaacagagaaccaaatcatgcatgaactcccatt

SEQ ID NO: 16318 - DNA, 201 bp, Homo sapiens
gaggaagtgaaattatccctgtttgcagatgacatgattatatatttagaaaaccccatcgtctcagcctgaaatctccttaagctgataagcaacttcarcaaagtctcaggatacaaaatcaatgtgcaaaaatcacaagcattcctatacaccaataagagacaaacagagaaccaaatcatgcatgaactcccattc

SEQ ID NO: 16319 - DNA, 201 bp, Homo sapiens
aaagtaatttatagattcagtgctacctctatcaagctaccactgactttcttcaaagaattagaaaaaactactttaaatttcatatggaaaccaaaaasagcccatgtagccaagacaatcctaagcaaaaagaacaaagctggaggcctcatactacctgacttcaaattatactacaaggctacagtaaccaaaaca

SEQ ID NO: 16320 - DNA, 201 bp, Homo sapiens
ctggctagccatatgcagaaaactgaaactggaccccttccttacaccttatacaaaaattaacccaagatggattaaagacttaaatgtaagacccaaarccataaaaaccataaaagaaaacccaggcaataccattcaggacatgggcaaaaacttcatgactaaaacaccaaagcaatggcaataaaagccaaaatt

SEQ ID NO: 16321 - DNA, 201 bp, Homo sapiens
gaaatataaattattctactataaagacacatgcatacatatgtttattgatgcactatttatagtagcaaagaattggaaccaacccaaatggccatcartgatagactgctaaagaaaatatggtacatacacaccatggaatactatgtagccataaaaaggaatgagttcgtgtcctttgcagggacatgaatgaag

SEQ ID NO: 16322 - DNA, 201 bp, Homo sapiens
atgtggtattgacaagaagaccaagagtagaccagttagaagtaaaaatgagaaattatgggaatttggttgtggtaagggccagtggagagtaaaaaaakgggcgggtttgagaaatgttcaggaaaattgaggactaggtggtagattagagctgttgggtaatgggagaggtagagtcaaggttacgtctcaggtttc

SEQ ID NO: 16323 - DNA, 201 bp, Homo sapiens
taacctcagataaacataaagatgacttaaaatagtttcttcagtcaatctggatatgttaattctccttactttttttttctttttttattttattttaktattattatactttaagttttagggtacatgtgcacaatgtgcaggttagttacatatgtatacatgtgccatgctggtgtgctgcacccattaactcgt

SEQ ID NO: 16324 - DNA, 201 bp, Homo sapiens
tcagtcaatctggatatgttaattctccttactttttttttctttttttattttattttagtattattatactttaagttttagggtacatgtgcacaatstgcaggttagttacatatgtatacatgtgccatgctggtgtgctgcacccattaactcgtcatttagcattaggtatatctcctaaagctatccctcccc

SEQ ID NO: 16325 - DNA, 201 bp, Homo sapiens
cctcccccctccccccaccccacaacagtccccagagtgtgatattccaattcctgtgtccatgtgttctcattgttcaattcccacctatgagtgagaayatgcggtgtttggttttttgttcttgcgatagtttactgagaatgatgatttccaatttcatccatgtccctacaaaggacatgaactcatcatttttta

SEQ ID NO: 16326 - DNA, 201 bp, Homo sapiens
agcatggcacatgtatacatatgtaactaacctgcacattgtgcacatgtaccctaaaacttaaagtataataataataaaaaaaagaaagaaaaaagagaaaaaaaaatttagacaatctgctccacaaatctcaaatagtatgggcagatacgagtttacaaagtgaagaggagaaaacatctataaccaaatctaacg

SEQ ID NO: 16327 - DNA, 201 bp, Homo sapiens
cccctgcttttcatctctaaactcatcttctcccctttctctcctcctcttggtccactccagctgcactggattccttgtttatttagcaggccaaggamacatgtctgtagagcctttgcacttctcattcttaatgtgggaaatgatctgccccaagatatctgcatggatcaaaccattgcttctttcaggcctctg

SEQ ID NO: 16328 - DNA, 201 bp, Homo sapiens
aatgatctgccccaagatatctgcatggatcaaaccattgcttctttcaggcctctgctattcaaatgccccataaagcagagtctttctccgacttttcyattttcagttgcatagccttcccacaaatacacacacacacacacaccacacatgcacaccatcgttaatctacttaccaaactttttctttgcagtata

SEQ ID NO: 16329 - DNA, 201 bp, Homo sapiens
acctggctcagagggtcctacgcccacggaatctcgctgattgctagcacagcagtctgagatcaaactgcaaggtggcagcgaggctgggggaggggcasccgacattgcccaggcttgcttaggtaaacaaagcagcagggaagctcgaactgggtggagcccaccacagctcaaggaggcctgcctgcctctgtaggc

SEQ ID NO: 16330 - DNA, 201 bp, Homo sapiens
aacaaaattgatagactgctagcaagactaataaaggagaaaagaaagaagaatcaaatagacgcaataaaaaatgataaaggggatatcaccacagatcmcacagaaataaaaactaccatcagagaatactacaaacacctctacgcaaataaactagaaaatctagaagaaatggataaattccttgacacatacact

SEQ ID NO: 16331 - DNA, 201 bp, Homo sapiens
aaaaaccacatgattatctcaatagatgcagaaaaagcctttgacaaaattcaacaacccttcatgctaaaaactctcaataaattaggtattgatgggaygtatttcaaaataataagagctatctatgacaaacccacagccaatatcgtactgaatgggcaaaaactggaagcattccctttgaaaactgtcacaaga

SEQ ID NO: 16332 - DNA, 201 bp, Homo sapiens
actggaagcattccctttgaaaactgtcacaagacagggatgccctctctcaccactcctattcaacatagtgttggaagttctggccagggcaattaggbaggagaaggaaataaagggtattcaattaggaaaagaggaagtcaaattgtccctgtttgcagacgacatgattgtatatctagaaaaccccattgtctc

SEQ ID NO: 16333 - DNA, 201 bp, Homo sapiens
atgattgtatatctagaaaaccccattgtctcagcccaaaatctccttaagctgataagcaacttcagcaaagtctcaggatacaaaatcaatgtacagawatcacaagcattcttatataccaacaatcgacaaacagagagctaaatcatgagtgaactcccattcacaattgcttcaaagagaataaaatacctagga

SEQ ID NO: 16334 - DNA, 201 bp, Homo sapiens
caacttcagcaaagtctcaggatacaaaatcaatgtacagaaatcacaagcattcttatataccaacaatcgacaaacagagagctaaatcatgagtgaaytcccattcacaattgcttcaaagagaataaaatacctaggaatccaacttacaagggatgtgaaggacctcttcaaggagaactacaaaccactgctcaa

SEQ ID NO: 16335 - DNA, 201 bp, Homo sapiens
aatgtactagcatagcgtagatcttatggtctgataaactgttaatacattttggaagtgtataatttttgttttgttggatagaaatgtctcccaagtgtttttttttttctctaggaaaatgtgatccatactgaaattaaatttttatattgaggttccaccaaaataattaatcagtaccctaaataacacttacaa

SEQ ID NO: 16336 - DNA, 201 bp, Homo sapiens
ggtgcaatctcggctcactgcaacctccacctcccgggttcaagtgattctcctgcctcagcctcctgaatagctgggatattacaagtgcgtgacaccamgcccggctaatttttgtatttttagtatagacggggtttcgccattttggccaagctggtctcgaactcccaacctcaggtgatccgcccgcctcggcct

SEQ ID NO: 16337 - DNA, 201 bp, Homo sapiens
tgcaacctccacctcccgggttcaagtgattctcctgcctcagcctcctgaatagctgggatattacaagtgcgtgacaccacgcccggctaatttttgtwtttttagtatagacggggtttcgccattttggccaagctggtctcgaactcccaacctcaggtgatccgcccgcctcggcctcccgaagtgctgggatta

SEQ ID NO: 16338 - DNA, 201 bp, Homo sapiens
tattacaggattttgtgattctcagatgagtgggaaggaggtgagggagaaatggggaaaaggaagaagacaaaataaaagagagaggaaaaaaccacagrgagagacacacacagcacacagagtgtgcgtggggaagaggagcaggtggaggagaaaggagaaaaggaaggacagagggatggagacccagcagattgg

SEQ ID NO: 16339 - DNA, 201 bp, Homo sapiens
ggctgaggtggaaggatcacatgagcctgggaggttgaggctgcagtgagctatggtcatgccactgcactccagcctgggtgacagagcaagaccctgcatatatatatatatatatatatatatatatatatatatcttagttcttaattaattttagttgtttttgttgttattcccaaagagctatggcacatggta

SEQ ID NO: 16340 - DNA, 201 bp, Homo sapiens
gctgaggtggaaggatcacatgagcctgggaggttgaggctgcagtgagctatggtcatgccactgcactccagcctgggtgacagagcaagaccctgcatatatatatatatatatatatatatatatatatatatcttagttcttaattaattttagttgtttttgttgttattcccaaagagctatggcacatggtag

SEQ ID NO: 16341 - DNA, 201 bp, Homo sapiens
ctgaggtggaaggatcacatgagcctgggaggttgaggctgcagtgagctatggtcatgccactgcactccagcctgggtgacagagcaagaccctgcatatatatatatatatatatatatatatatatatatatcttagttcttaattaattttagttgtttttgttgttattcccaaagagctatggcacatggtaga

SEQ ID NO: 16342 - DNA, 201 bp, Homo sapiens
tgaggtggaaggatcacatgagcctgggaggttgaggctgcagtgagctatggtcatgccactgcactccagcctgggtgacagagcaagaccctgcatatatatatatatatatatatatatatatatatatatcttagttcttaattaattttagttgtttttgttgttattcccaaagagctatggcacatggtagat

SEQ ID NO: 16343 - DNA, 201 bp, Homo sapiens
ttagtttaattagatcccatttgtcagttttggcttttgttgccattgcttttggtgttttagtcatgaagtctttctccatgcctatgtcctgaatggtattgcctaggtttccttctatggtttttatgcttttaggtcttgtgtttaagtctttaatccatcctgagtcaatttttgtataaggtgtaaggaaggtgt

SEQ ID NO: 16344 - DNA, 201 bp, Homo sapiens
gagtctcagggatgaagccgacttgatcatggtggagaagctttttgatgtgctgccggattcagtttgccagtattttattgaggattttcacattgatrttcatcaggatattggcctgaaattttcttttttgtgtgtgtctctgccaggttttggtattaggatgacgttggcatcataaaatgagttagggaggag

SEQ ID NO: 16345 - DNA, 201 bp, Homo sapiens
atccttatccctaggtccagaaattttttccaggtttcctccacagtcagtgaactctagggagcctgtgccaagctctactctagtttctatagtgggtkgggggggaatgtagaaaaagaaaaaaactttttgccttttaggagcttgccaaataattgaaaagtatagagacacacaagtaaaaatttaaactgacac

SEQ ID NO: 16346 - DNA, 201 bp, Homo sapiens
gcctggactatcacagtgtaacctgtgataagttacactcttgggactcttgtgaagtgttcataatctttcttggataatataaaagaacagtctaaaaktgctttactctgtagcaccattgcacaatagaactttctgagatgatggaactattgtataatctgtgctgttcaatacagaagccactagctgtatgtg

SEQ ID NO: 16347 - DNA, 201 bp, Homo sapiens
cctggactatcacagtgtaacctgtgataagttacactcttgggactcttgtgaagtgttcataatctttcttggataatataaaagaacagtctaaaatwgctttactctgtagcaccattgcacaatagaactttctgagatgatggaactattgtataatctgtgctgttcaatacagaagccactagctgtatgtgg

SEQ ID NO: 16348 - DNA, 201 bp, Homo sapiens
tctttcttggataatataaaagaacagtctaaaattgctttactctgtagcaccattgcacaatagaactttctgagatgatggaactattgtataatctrtgctgttcaatacagaagccactagctgtatgtggctattgagcagttgaaatgtgggtagtgcaatgaaggcaataaatttttaatttaattcaatcta

SEQ ID NO: 16349 - DNA, 201 bp, Homo sapiens
acaataatttgttcaaaggaagcacctgtgggtctatcacaggttttcaccactagtcagtgtttcagtgaaaacattactcctaaaacacaattatggtkcttggaagagataaacataacctatgaaggtgtcatgatctcattataatagtagttttctcatgcattcctggaagagcaggaagcctggagggtgctg

SEQ ID NO: 16350 - DNA, 201 bp, Homo sapiens
gttaaatctttgaaaaccagatactatgtcttcttttatggaagtgtaaaaacattgtcataagcatttagaaaaaaaattaaactctaatttctaccacrgataaagcaggcttattcttccaactatgcacagtttgagaatgagattggagcatgggtcaattatctgccccatgatattttgggaagacacaggttt

SEQ ID NO: 16351 - DNA, 201 bp, Homo sapiens
gcaatgcccagattgtggttggatatgatataaaggatttacctgtaaaagtttcctcacagtcagaagcatcgcttagctcacagaagtatgtacatgtrggaaaatcaatagtataatagcatatatgcatactttagatcagaggaaacttggaacagctttcagttatattacttccaaatgctcaaatcatgctaa

SEQ ID NO: 16352 - DNA, 201 bp, Homo sapiens
tggggggcggaggttgcggtgagctgagattgcaccattgcactccagcctgggcaacaagagcaaaactctgtctcaaaaaaaaaaaaaaaaaaaaaaaacaactcaggaagtccatgttttcttaacgtaaatttttactttcctggcatcaaaaattggtcttgacaaaagtgcccaaagcgtttacacaaaatttta

SEQ ID NO: 16353 - DNA, 201 bp, Homo sapiens
gcaacaagagcaaaactccatctcaaaaaaaaaaaaaagtcttcactgaggcctaagccttctctctattttagaataccagaatggcggcattttttttwaaaatgtgcatggctcttatatttagtctttgtgactgatatggtttgactgtgtctccatgcaaatctcaccctgaattgtatctctcagaattcccac

SEQ ID NO: 16354 - DNA, 201 bp, Homo sapiens
tgttttggaagcgaagctcagtgagaagaggtttctggtgcttttgcagggcagaatgagtagacgatgatgaaggcactgtagacatagtcattgtagasttgggaagtccagaaaaaagtgagaaagggactccttcagttgcatgatgaagttcttttgcgaaacagtaacttggagttctgtttaatttataaaatc

SEQ ID NO: 16355 - DNA, 201 bp, Homo sapiens
acaaatggcaagatttctttcatttttaaagctgaatatttcattatttcatatgtatgtatttcatatgtgtatatgtatgtgtatatatgtatatatgcacatgtgtatatatgtatatatgcatgtgcatatatacacatgcatacatatatatacacacacacacacacacacacacacacacatctcacatttttt

SEQ ID NO: 16356 - DNA, 201 bp, Homo sapiens
caaatggcaagatttctttcatttttaaagctgaatatttcattatttcatatgtatgtatttcatatgtgtatatgtatgtgtatatatgtatatatgcacatgtgtatatatgtatatatgcatgtgcatatatacacatgcatacatatatatacacacacacacacacacacacacacacacatctcacattttttt

SEQ ID NO: 16357 - DNA, 201 bp, Homo sapiens
catttttaaagctgaatatttcattatttcatatgtatgtatttcatatgtgtatatgtatgtgtatatatgtatatatgcacatgtgtatatatgtatayatgcatgtgcatatatacacatgcatacatatatatacacacacacacacacacacacacacacacatctcacatttttttttatccattcatctgttaa

SEQ ID NO: 16358 - DNA, 201 bp, Homo sapiens
atgtatttcatatgtgtatatgtatgtgtatatatgtatatatgcacatgtgtatatatgtatatatgcatgtgcatatatacacatgcatacatatatayacacacacacacacacacacacacacacacatctcacatttttttttatccattcatctgttaagttgtttccacatcttggctattgtggataatgctg

SEQ ID NO: 16359 - DNA, 201 bp, Homo sapiens
tgtatttcatatgtgtatatgtatgtgtatatatgtatatatgcacatgtgtatatatgtatatatgcatgtgcatatatacacatgcatacatatatatacacacacacacacacacacacacacacacatctcacatttttttttatccattcatctgttaagttgtttccacatcttggctattgtggataatgctgc

SEQ ID NO: 16360 - DNA, 201 bp, Homo sapiens
gtatttcatatgtgtatatgtatgtgtatatatgtatatatgcacatgtgtatatatgtatatatgcatgtgcatatatacacatgcatacatatatatacacacacacacacacacacacacacacacatctcacatttttttttatccattcatctgttaagttgtttccacatcttggctattgtggataatgctgca

SEQ ID NO: 16361 - DNA, 201 bp, Homo sapiens
tatttcatatgtgtatatgtatgtgtatatatgtatatatgcacatgtgtatatatgtatatatgcatgtgcatatatacacatgcatacatatatatacacacacacacacacacacacacacacacatctcacatttttttttatccattcatctgttaagttgtttccacatcttggctattgtggataatgctgcaa

SEQ ID NO: 16362 - DNA, 201 bp, Homo sapiens
atttcatatgtgtatatgtatgtgtatatatgtatatatgcacatgtgtatatatgtatatatgcatgtgcatatatacacatgcatacatatatatacacacacacacacacacacacacacacacatctcacatttttttttatccattcatctgttaagttgtttccacatcttggctattgtggataatgctgcaat

SEQ ID NO: 16363 - DNA, 201 bp, Homo sapiens
ggctcaagcgatcctcccacctcagccttctgggtagctgggactagaggcccacgccaccacgtctggctggctagtttttgtagggtttttttttttctttttttttttgtagcgctgggtttttgctatgttgtccaggctggtcttgaactcctggactcaagcaattcaccagcctcagcctcccatagtgctggg

SEQ ID NO: 16364 - DNA, 201 bp, Homo sapiens
tatcataattcactgtgcaatagctttcagtgctaggatgttaggtaaatacttgattaatgagttactttagattactaatcattaaatatggtctcccttttttttttgtcttttcttaaaatattaactacactgggaaagcaagaaagcacacctgccatttcctcactatgggctatcatttctccttgtatgtgt

SEQ ID NO: 16365 - DNA, 201 bp, Homo sapiens
ttttgcttttgcagtttcagttacctgtggtcaactgtggtccgaaaataggtgagtgttgtacaagaatagagagagagagagagagacaccacattcaygtaacttgtattatagtatattgttattattgttctattttattattaattattgttatcaatctcttacagtgcctaatttataaattcgactttatca

SEQ ID NO: 16366 - DNA, 201 bp, Homo sapiens
tatctgtgtaccagtataaggaaaatacagtgattctgggtttcaaaacccaaatacactgaaacattgtggagtttttaaagtaaggaatgtgcttggtytggcagatgataaaacatgttagttgcttaaaattattgccaattattttggtaaatacattcaaacttttttaaatttttttattttttgtgatagggt

SEQ ID NO: 16367 - DNA, 201 bp, Homo sapiens
cattcaaacttttttaaatttttttattttttgtgatagggtctcaccctgtcacccaggctggagtgcagtgatgcaatcatggcttactgcagcctccmcctcctgggcccaagcaatgctcccacctcagcctcctgagtagctaggactacagggttgcaccaccatgcccagctaatttttttttttttttttttt

SEQ ID NO: 16368 - DNA, 201 bp, Homo sapiens
gagtgcagtgatgcaatcatggcttactgcagcctccacctcctgggcccaagcaatgctcccacctcagcctcctgagtagctaggactacagggttgcmccaccatgcccagctaatttttttttttttttttttttttttttttttgtagaaacagggtttcaccaggctgattttgaactcctgggctcaagtgttc

SEQ ID NO: 16369 - DNA, 201 bp, Homo sapiens
ccatgcccagctaatttttttttttttttttttttttttttttttgtagaaacagggtttcaccaggctgattttgaactcctgggctcaagtgttccttytgccttagcctcccaaagtgctgggattacaggcatgagccaatacacctggcttcaaagtttttttttttttctagagaatcagcagtgtaatagaaat

SEQ ID NO: 16370 - DNA, 201 bp, Homo sapiens
gagttgtttccaccctttggttattatgaatgatgttgctataaacattcatgtacatgtttctgtgtggacatgtgttttcatttctcttagaaatatacctgagtataattgctgggccatgtagtaactctctgtttaattgtttaaggaactgacagactgttttcaaagcagctgccccattttacattcctaccg

SEQ ID NO: 16371 - DNA, 201 bp, Homo sapiens
tgcctgttcactctgatggtagtttcttttgctgtgcagaagctctttagtttaattagatcccatttgtcaattttggcttttgttgccattgcttttgktgttttagtcatgaagtccttgcccatgcctatgtcctgaatggtattgcctaggtttttttctggggtttttatggttttagttctaacatttaagtct

SEQ ID NO: 16372 - DNA, 201 bp, Homo sapiens
tataaattaccttgggcagtatggccattttcacaatattggttcttgctatccatgagcatggagtgttcttccatttgtttgtgtcctcttttatttcrttgagcagtggtttgtagttctccttgaagaggtccttcacatcccttgtaagttggattcctaggtattttattctctttgaagcaattgtgaatggga

SEQ ID NO: 16373 - DNA, 201 bp, Homo sapiens
tgtataggaatgcttgtggtttttgcacgttgattttgtatcctgagactttgctgaagttgcttatcagcttaaggagatttggggctgagatgacgggkttttctaaatataccatcatgtcatctgcacttttcctaagtgaatactccttatttctttctcctgcctgattgctctggccagaacttccaacactat

SEQ ID NO: 16374 - DNA, 201 bp, Homo sapiens
ttggctgtgggtttgtcataaatagctcttattattttgagatacactccatcaatacctagttaattgagagtttttagcgtgaagggctgttgaatttygtcaaaggccttttctgcatctcttgagataatcatgtggtttttgtctttggttctgtttatatgatggattacatttattgatttgcatatgttgaac

SEQ ID NO: 16375 - DNA, 201 bp, Homo sapiens
tgatttgctgctggatttggtttgccagtatttcattgatgatttttgcatcgatgttcatcagggatattggtctaaaattatcttattttgttgtgtcyctgccaggctttggtattaggatgatgttggcctcataaaatgcattagggaggattccctctttttctattgattggaatagtttcagaaggaatggaa

SEQ ID NO: 16376 - DNA, 201 bp, Homo sapiens
tgtttgctcttgcttctctagttcttttaattgtgatgttagggtgtcaattttggatctctcctgctttctcttgtgggcatttagtgctataaatttcmctctacacactgctttaaatgtgtcccagagattctggtatgttgtgtctttgttctcattggtttcaaagaacatctttaattctgccttcatttcatt

SEQ ID NO: 16377 - DNA, 201 bp, Homo sapiens
tataaatttccctctacacactgctttaaatgtgtcccagagattctggtatgttgtgtctttgttctcattggtttcaaagaacatctttaattctgccytcatttcattatgtacctggtagtcattcaggagcaggttgttcagtttccatgtagttgagcggttttgagtgagtttcttaatcctgagttctagttt

SEQ ID NO: 16378 - DNA, 201 bp, Homo sapiens
ttgccagcatctattatttttgactttttaataatagccatgctgactggcatgagatgttatctcattgtgattttgatttgcatttctctagtcatcartgatattcacctttttttatatgtttattgaccagatgtatgtcttctgttgagaagtctctgtttatgtcctttgtccacttttaaatgggggttgttt

SEQ ID NO: 16379 - DNA, 201 bp, Homo sapiens
agttttcaaggggaatgcttccaactttttcccattcagtaaaatgttagctgtgggtttgtcacaaatggcttttattgttttgaggtatgtccttcaaygcctagtttattgagagtttttaacatgaaggggtgttgaattttatgtaaagccctttcttcatctgttgaggtaatcatgtggtttttgtctagtttt

SEQ ID NO: 16380 - DNA, 201 bp, Homo sapiens
ttaggattgctatccctgcttttgcctgttttccatttgtttggtagattttcctctatccctttattttgagcctatgattgtcattacatgtgagatagcatgtaatgacaagacagcatactattagttcttgcttttttatccactttgccactctgtgccttgttgagtgggacatttggtccatttacattccag

SEQ ID NO: 16381 - DNA, 201 bp, Homo sapiens
tgattgtcattacatgtgagatagcatgtaatgacaagacagcatactattagttcttgcttttttatccactttgccactctgtgccttgttgagtgggrcatttggtccatttacattccaggttagtattgatatgtgtggatttgatcctattattgtgctgttagctggttattacataggcttgtttgtgtggtt

SEQ ID NO: 16382 - DNA, 201 bp, Homo sapiens
caagggtagcaagggcagttccactgcaaaggcaatggcagagaggctttcagttgcccctgggggcctggtccaaggaatttccgaattgctactggctygatagctctggcaggggttggctggaggcccaggcctggaggacctgtctagtgaggagatatgggaacggacacccatgtaacagtctgtctacttttc

SEQ ID NO: 16383 - DNA, 201 bp, Homo sapiens
gtgagtacctggatgtttcagttgaagttgttgtatttacttgccctgttcattcctctccatgagaggcatgcacactagctacttctagtaagccatcwtgctttatctggttttgattttagagtaatactagcctcataggatgagttaggaagtgttccttctgtttttatttaaaagagtttgtaaagaattggt

SEQ ID NO: 16384 - DNA, 201 bp, Homo sapiens
acttaaaactggcatatttttggtatgttttattgtttttagtgatattgtcttctagaaccttaactattttgcataaactgatacaagcagtgcattatttgtttgttctcaaaaaatacacctaattgtgttaatataagactaagaggactagtgcagtgctcctaaaatagcagtgtggagacctaacagcaatta

SEQ ID NO: 16385 - DNA, 201 bp, Homo sapiens
cttaaaactggcatatttttggtatgttttattgtttttagtgatattgtcttctagaaccttaactattttgcataaactgatacaagcagtgcattatttgtttgttctcaaaaaatacacctaattgtgttaatataagactaagaggactagtgcagtgctcctaaaatagcagtgtggagacctaacagcaattat

SEQ ID NO: 16386 - DNA, 201 bp, Homo sapiens
ttaaaactggcatatttttggtatgttttattgtttttagtgatattgtcttctagaaccttaactattttgcataaactgatacaagcagtgcattatttgtttgttctcaaaaaatacacctaattgtgttaatataagactaagaggactagtgcagtgctcctaaaatagcagtgtggagacctaacagcaattatt

SEQ ID NO: 16387 - DNA, 201 bp, Homo sapiens
taaaactggcatatttttggtatgttttattgtttttagtgatattgtcttctagaaccttaactattttgcataaactgatacaagcagtgcattatttgtttgttctcaaaaaatacacctaattgtgttaatataagactaagaggactagtgcagtgctcctaaaatagcagtgtggagacctaacagcaattattt

SEQ ID NO: 16388 - DNA, 201 bp, Homo sapiens
acaaatgcctggtagatgctcaggatttcttaaggagcagaagcctgtacccactcattacacattctggcttttgttattctcccccaagtctaacacaggtcagaaggagaataattactgcctgaggcaagtaattttctgaggcaagcagggacatttcaccaacatgtccttagtgctacttccacaggtatcaga

SEQ ID NO: 16389 - DNA, 201 bp, Homo sapiens
cataatttaagtcttcagattcctaagttactgatttttgcaaacaattctcttataaatgacatcaaatatataggtaattaagagtaagagagcgtgcttttttttttttttttttttttgcctgtttgcgttctgaacaaagaaatgtgggactcagtaaggtgagaaaaatgacatttgcctccctaaaggatcact

SEQ ID NO: 16390 - DNA, 201 bp, Homo sapiens
ataatttaagtcttcagattcctaagttactgatttttgcaaacaattctcttataaatgacatcaaatatataggtaattaagagtaagagagcgtgcttttttttttttttttttttttgcctgtttgcgttctgaacaaagaaatgtgggactcagtaaggtgagaaaaatgacatttgcctccctaaaggatcacta

SEQ ID NO: 16391 - DNA, 201 bp, Homo sapiens
aggtccgggccacagctgatttttagaggaggccccttgcacacaaaccaagtttgcttctggccaatagacctagaaattacaggctgatcttgctttactcctctatacgtgcttcagaaatgacttctttgcagaaactgtgttggcatggttaattaaaaagcattgttagaagagggcacaaggggagtgtcattc

SEQ ID NO: 16392 - DNA, 201 bp, Homo sapiens
ggtccgggccacagctgatttttagaggaggccccttgcacacaaaccaagtttgcttctggccaatagacctagaaattacaggctgatcttgctttactcctctatacgtgcttcagaaatgacttctttgcagaaactgtgttggcatggttaattaaaaagcattgttagaagagggcacaaggggagtgtcattcc

SEQ ID NO: 16393 - DNA, 201 bp, Homo sapiens
gtccgggccacagctgatttttagaggaggccccttgcacacaaaccaagtttgcttctggccaatagacctagaaattacaggctgatcttgctttactcctctatacgtgcttcagaaatgacttctttgcagaaactgtgttggcatggttaattaaaaagcattgttagaagagggcacaaggggagtgtcattcca

SEQ ID NO: 16394 - DNA, 201 bp, Homo sapiens
tgggaacattcagtttgtggaaattatgtgatgtatatttctggatatttcaacaaaaagttaaacaaagcttacagaacaattaagaatccattgttacaaaaaaaaaaaaaaaaaaaaagcctattggtggccgggcatagtggctcacacctgtaatcctagcgcttcaggaggccaaggcaggtagatcatgagatc

SEQ ID NO: 16395 - DNA, 201 bp, Homo sapiens
tctcctactggctccttttgtgtagcggtaagtgaagattcaatgggacaaggctctaaatggactggaggcctcttttccattagagatgtgtttcctcatagacttttgtcttcacactttattttcttgtgcccactgcctcttattcgatcatttgttgtttctattctcaaactctctttcttcttctcctaattt

SEQ ID NO: 16396 - DNA, 201 bp, Homo sapiens
ctcctactggctccttttgtgtagcggtaagtgaagattcaatgggacaaggctctaaatggactggaggcctcttttccattagagatgtgtttcctcatagacttttgtcttcacactttattttcttgtgcccactgcctcttattcgatcatttgttgtttctattctcaaactctctttcttcttctcctaatttt

SEQ ID NO: 16397 - DNA, 201 bp, Homo sapiens
tttgggaggctgaggtaggagaattgcttgagcccaggaattcaagaccagcctgggcaacatagaaagatctcatctctacaaaaaataaaaaataaaasaaaactagctgggcatggtggcatgcacccctggtcccagctgttcaggaagctgatgtgagaagatcgcttgaaccccgaaggtcaaggctgcagtgag

SEQ ID NO: 16398 - DNA, 201 bp, Homo sapiens
ttcctcctgtctaactgtaactttgtatctgttgatctcttcccatcctgcccctaaccccacctctccagtctctggtatcagtttcttttttcttttcttttttttttttttttactatcaacagaacctcatcaaattatctcatttaatggtaccacctctccaggcatatcggcaggcaccaattggcaggcacca

SEQ ID NO: 16399 - DNA, 201 bp, Homo sapiens
gcatccaataatcacctcaggataaattcatagaaaagaaaatgctgggtcaacagatatcttcattttaaattaaaatatctctaatatttattgtaaayaaaacctttaaacaaaacaagacagaacacagacaagtatcaaagtctcctccaaccccctagctgttatgccagtctccaaaagaaacctggtatagac

SEQ ID NO: 16400 - DNA, 201 bp, Homo sapiens
catttgctgttctgcagcctctgctgctgatacccaggcaaacagggtctggagtggacctccagcaaactccaacagaccttcagctgagggtcctgacycttagaaggaaaactaacaaacagaaaggacatccacaccaaaaacccatctgtacatcaccatcatcaaagaccaaaggtagataaaaccataaagatg

SEQ ID NO: 16401 - DNA, 201 bp, Homo sapiens
aaggacatccacaccaaaaacccatctgtacatcaccatcatcaaagaccaaaggtagataaaaccataaagatggggaaaaaacagagcagaaaaactgmaaattctaaaaatcagagcacctctcctcctccaaaggaacacagctcctcaccagcaatggaacaaagctggatggagaatgactttgacaagttggga

SEQ ID NO: 16402 - DNA, 201 bp, Homo sapiens
tctgcgagctaaaggaggaagttcgaacccatggcaaagaaattaaaaaccttaaaaaagattaggcaaatggataactagaataaccaatgcagagaagyccttaaaagacttgatggagctgaaaaccatggcacgagaactatgtgatgaatgcacaagcttcagtagccaattcgatcaaatggaagaaagggtatc

SEQ ID NO: 16403 - DNA, 201 bp, Homo sapiens
attgtctcagcccaaaatctccttaagctgataagcaacttcagcaaagtctcaggatataaaatcaatgtgcaaaaatcacaagcattcttacacaccartaacagacagagagccaaatcacgagtgaactcccattcacaattgcttcaaagagaataaaatacctaggaatccaacttacaaaagatgtgaaggacg

SEQ ID NO: 16404 - DNA, 201 bp, Homo sapiens
ataacagacagagagccaaatcacgagtgaactcccattcacaattgcttcaaagagaataaaatacctaggaatccaacttacaaaagatgtgaaggacstcttcaaggagaactacaaaccactgctcaacgaaataaaagaggatacaaatggaagaacattccatgctcatggataggaagaatcaatatcatgaaa

SEQ ID NO: 16405 - DNA, 201 bp, Homo sapiens
caaatcacgagtgaactcccattcacaattgcttcaaagagaataaaatacctaggaatccaacttacaaaagatgtgaaggacgtcttcaaggagaactrcaaaccactgctcaacgaaataaaagaggatacaaatggaagaacattccatgctcatggataggaagaatcaatatcatgaaaatggccatactgccca

SEQ ID NO: 16406 - DNA, 201 bp, Homo sapiens
tcccattcacaattgcttcaaagagaataaaatacctaggaatccaacttacaaaagatgtgaaggacgtcttcaaggagaactacaaaccactgctcaaygaaataaaagaggatacaaatggaagaacattccatgctcatggataggaagaatcaatatcatgaaaatggccatactgcccaaggtaatttacagatt

SEQ ID NO: 16407 - DNA, 201 bp, Homo sapiens
aatcaatatcatgaaaatggccatactgcccaaggtaatttacagattcaatgccatccccatcaagctaccaatgactttcttcacagaattggaaaaarctactttaaagttcatatgcaaccaaaaaagagcccacattgccaagtcaatcctaagccaaaagaacaaagctggaggcatcacgctacctgacttcaa

SEQ ID NO: 16408 - DNA, 201 bp, Homo sapiens
acagaattggaaaaagctactttaaagttcatatgcaaccaaaaaagagcccacattgccaagtcaatcctaagccaaaagaacaaagctggaggcatcasgctacctgacttcaaactatattacaaggctacagtaaccaaaacagcatggtactggtaccaaaacagagatatagaccaatggaacagaacagagccc

SEQ ID NO: 16409 - DNA, 201 bp, Homo sapiens
caaaacagcatggtactggtaccaaaacagagatatagaccaatggaacagaacagagccctcagaaataatgccacagatctacaccgatctgatcttcracacctatttaataaatggtgctgggaaaactggctagccatatgtagaaagctgaaactggatcccttccttacaccttatacaaaaattaattcaaga

SEQ ID NO: 16410 - DNA, 201 bp, Homo sapiens
accaaaatgtccaacgatgatagactggattaagaaaatgtggcacatatacaccatggaatactatgaacccataaaaaatgatgagttcatgtcctttstagggacatggatgaagctggaaaccatcattctcagcaaactatcgcaaggacaaaaaaccaaacaccgcatgttctcactcataggtgggaattgaac

SEQ ID NO: 16411 - DNA, 201 bp, Homo sapiens
tactatgaacccataaaaaatgatgagttcatgtcctttgtagggacatggatgaagctggaaaccatcattctcagcaaactatcgcaaggacaaaaaamcaaacaccgcatgttctcactcataggtgggaattgaacaatgagaacacttggatacaggaaggggaacataacacaccggggcctgttttggggtggg

SEQ ID NO: 16412 - DNA, 201 bp, Homo sapiens
tccttgacctcttctgcacaatccactgtgagtgcaaggggaagaaataagtaccccctctcagcctgtagtcacatcttccctctctctatatggctatggacgcagtcccagaattctggatttcttgcatgtctgcctttaataagaaagcagagtttaaataggctctcactattgtttcgctgcttcacaccctcc

SEQ ID NO: 16413 - DNA, 201 bp, Homo sapiens
taatttctctctaatgataccttctcagttcattctctgggttcttggttatctctctcccctccgcttcttcttttctccagccctgtccttttttttcyttttttttttttttttttttttttgtagtgggcaggctaggaggcatgattaggattgatggaggaggggaactattccagttcatttattttttccctg

SEQ ID NO: 16414 - DNA, 201 bp, Homo sapiens
gatgcacgtatttcccatgggcattaatagtcgtttattaaaagttatgactaagtctccattctctccagctctggactttagccctgctctctttcackggtaacaccagagatgtaacctgggaccatacagaggaccatggttaacaagggcagcgcttgttatacccctggtaataggtatttactaggtttctta

SEQ ID NO: 16415 - DNA, 201 bp, Homo sapiens
atgcacgtatttcccatgggcattaatagtcgtttattaaaagttatgactaagtctccattctctccagctctggactttagccctgctctctttcacgsgtaacaccagagatgtaacctgggaccatacagaggaccatggttaacaagggcagcgcttgttatacccctggtaataggtatttactaggtttcttaa

SEQ ID NO: 16416 - DNA, 201 bp, Homo sapiens
aaataatattgcccgtgggccagtccctaaaagtaaatgtttccaataattttttggcatccaatgttttactaacactaatttggtcgcatttgcagacmttacctcttcaatgttcatattcttcctaaacaattgtttattttgaaagagagtttgttctagtcaatatcagtccacttctaatgaatttttccccaa

SEQ ID NO: 16417 - DNA, 201 bp, Homo sapiens
ttatgtgccagatactgttctatgcttaaaatacacctgtgaatcaaatagacaaagacaattaaacattttagatactatctagaaaggggaacaggcgrggagacaaataaaaactcacaaagaatcttattttatcacatgagcattaaaaaggtcgctttgtgattgtgagcttgaataagcctgccaatttttgct

SEQ ID NO: 16418 - DNA, 201 bp, Homo sapiens
atggtggcaggcaagagagtatgtgcaggggaacttccctttataaaatcatcagatcttgtgagacttattcactatcatgagaacagcatgggaaaaaycagcctccatgattaaattacctcccactaggtccctcccatgacatgtgggatttatgggagctacaattcaagatgagatttgggtggggacacagcc

SEQ ID NO: 16419 - DNA, 201 bp, Homo sapiens
tattcaaaaatgctttgtagatagctacactaagcattctaaatctttatttcttggttctagcaaagtattgacaaatttcaggttttcttttttttttwtttttagagatggagtctcactctgtcacccaggctggagtgcagtggcaagatctctgctcactgcaagctccgcctcccgggttcacaccattctcct

SEQ ID NO: 16420 - DNA, 201 bp, Homo sapiens
gatgagggtaatgtttatttgtcattataaatctggaaagataaaccctgtgctttccctgttaaggggctggataggaatacgtgttcagcaagtcagtaaaaaaaaaaaaaaaaaattgtatattttgaaagttgattccaagtccaaatcttggaaacagagatctctgtttttgcgtttgttcttttcctttgttct

SEQ ID NO: 16421 - DNA, 201 bp, Homo sapiens
atgagggtaatgtttatttgtcattataaatctggaaagataaaccctgtgctttccctgttaaggggctggataggaatacgtgttcagcaagtcagtaaaaaaaaaaaaaaaaaattgtatattttgaaagttgattccaagtccaaatcttggaaacagagatctctgtttttgcgtttgttcttttcctttgttcta

SEQ ID NO: 16422 - DNA, 201 bp, Homo sapiens
taaatggatcttttacttatgaatgattttgtaacatcatacatttgtcatttggaaaacattggttcactgatttacacagatcttccaaatgtttatacatttcattctacaatgcttaaaaatcacattcattaatatccaccaatcttatcagaaaaagggaaggtgtcaatgacgcccatggtgatagatatgagt

SEQ ID NO: 16423 - DNA, 201 bp, Homo sapiens
ccttcatcttggatcaaaatggtgagaaatttaaaaccgagaatttccctgaaacactggtttttaaaccttctctagtgaaggttttttttttttttttwaattttcaattacttgcagatcaatgcaaggtcctattgcacgcctgagcagtttgcaacttgcatggcatgagactcaccttatgagttcagcagcact

SEQ ID NO: 16424 - DNA, 201 bp, Homo sapiens
agatcaagaccatcctggccaagatgctgaaacgccgtctctactaaaaatgcaaaaattaggcaggcgtggtggcaggcacttgtagtcccagctacccrggaggctgaggcaggaaaatcgcttgaaaccaggaggcggaggttgcagtgagctgagatcatgccactgcactccagcctgggtgatagagtgagactc

SEQ ID NO: 16425 - DNA, 201 bp, Homo sapiens
aaaccaggaggcggaggttgcagtgagctgagatcatgccactgcactccagcctgggtgatagagtgagactccatctcaaaaaaaaaaaaaaaaaaaaraaagaaagaaagaaagaaaaccaagtcaatgttgattttattgagatgtaagagggttatattctaaatttagcagggaagaggcagatttccctaggaa

SEQ ID NO: 16426 - DNA, 201 bp, Homo sapiens
ctaattcaaccattggcgaacactttattctgtcatgcattcattgcaaattattaccaaacaccagcgctgtgcttaggttctaagaggaacatgtcccmtattctcatggaattcacagtatagtgagagaggctgataacaaacagtaattacttaatcacaactgctaattacaactactgtgagaatttataatac

SEQ ID NO: 16427 - DNA, 201 bp, Homo sapiens
aatgaaatataataatgctaaacaaaatttacttttatattttaaaaagactatatgcattcagtataggagaggcctggttttataggaggtcacgtgcrcaggacctaaaggcagtggaaataataaatgataaaagtgtttgaattttgtatatttttcttatatatttaccttatctttggcattgtgttaagcaag

SEQ ID NO: 16428 - DNA, 201 bp, Homo sapiens
cattaattagaaacctattcatatgggaaacacttgaaaatattggctgaagggttggcttagagaatagaagacttcacacacacacacacacacacacrcacgcgcgtgcgtatattccttacacgcaactattaagttggtgcaaaagtattgcggtttttgcaaaaactgccattacttttgcattaacctaatatg

SEQ ID NO: 16429 - DNA, 201 bp, Homo sapiens
ggcggactgatcacctgaggtcaggagttcgagactagcctggccaacaatgtgaaatcccatctagactaaagatgcaaaactcagctgggccttgtggyatgttcctgtaatcacagctacttgggaggctgaggcaggagaatcgcttgaacctgggaggcggaggctccagtgagccaagatcatgccactgcactc

SEQ ID NO: 16430 - DNA, 201 bp, Homo sapiens
gcggactgatcacctgaggtcaggagttcgagactagcctggccaacaatgtgaaatcccatctagactaaagatgcaaaactcagctgggccttgtggcrtgttcctgtaatcacagctacttgggaggctgaggcaggagaatcgcttgaacctgggaggcggaggctccagtgagccaagatcatgccactgcactcc

SEQ ID NO: 16431 - DNA, 201 bp, Homo sapiens
atgggctagttgagaaggtagacattaatgaaaatacataactaaatataaaagcaagagagaaagaaaaaaaggaaggacagaaagaagaaagaaagaaagagagagagagagagaaagacagagaaagaaagaaaggaaaagaaagaaggataaaaagaaaaacagatgcataattctgaaatcacaactgtgatgagt

SEQ ID NO: 16432 - DNA, 201 bp, Homo sapiens
tgggctagttgagaaggtagacattaatgaaaatacataactaaatataaaagcaagagagaaagaaaaaaaggaaggacagaaagaagaaagaaagaaagagagagagagagagaaagacagagaaagaaagaaaggaaaagaaagaaggataaaaagaaaaacagatgcataattctgaaatcacaactgtgatgagtg

SEQ ID NO: 16433 - DNA, 201 bp, Homo sapiens
attaatgaaaatacataactaaatataaaagcaagagagaaagaaaaaaaggaaggacagaaagaagaaagaaagaaagagagagagagagagaaagacagagaaagaaagaaaggaaaagaaagaaggataaaaagaaaaacagatgcataattctgaaatcacaactgtgatgagtgctacaaaggaaaggtaaatata

SEQ ID NO: 16434 - DNA, 201 bp, Homo sapiens
aatgaaaatacataactaaatataaaagcaagagagaaagaaaaaaaggaaggacagaaagaagaaagaaagaaagagagagagagagagaaagacagagaaagaaagaaaggaaaagaaagaaggataaaaagaaaaacagatgcataattctgaaatcacaactgtgatgagtgctacaaaggaaaggtaaatataata

SEQ ID NO: 16435 - DNA, 201 bp, Homo sapiens
atgaaaatacataactaaatataaaagcaagagagaaagaaaaaaaggaaggacagaaagaagaaagaaagaaagagagagagagagagaaagacagagaaagaaagaaaggaaaagaaagaaggataaaaagaaaaacagatgcataattctgaaatcacaactgtgatgagtgctacaaaggaaaggtaaatataatag

SEQ ID NO: 16436 - DNA, 201 bp, Homo sapiens
cttcctccctttttccttccccatctagtaatccccagtgtctattgttcccaactttgtctatatgtgcccaatgtttagctcccacttataagtgagarcatgcagtatttggttttctgtttgtgcattaatattattaggataatggcttccagctccatccatgttgttgcaaaggacataactttgttcttttta

SEQ ID NO: 16437 - DNA, 201 bp, Homo sapiens
gagtgcagcccacagaggacgagccaaagcagggtagggcatcacctcacctggggttggggaatttccctttcctagccaagggaagccgtgacagactrtacctggaaaaatgggacattcccgactaaatactgtgcttttccaatggtcttagcaaatggcacaccaggagattatatcccacgcctggctcagcag

SEQ ID NO: 16438 - DNA, 201 bp, Homo sapiens
atcaccagcaatggaataaagctggatggagaatgactttgatgagttgacagaagtaggcctcagaaggtcagtaataacaaacttctccaagcaaaagragcatgttctaacccattgcaaggaagctaaaaaccttgaaacaaggttagacaaatggataactagaataaagagtgtagagaagaccttaaatgacct

SEQ ID NO: 16439 - DNA, 201 bp, Homo sapiens
ccaggagaacttccaacctagcaagggaggccaactttcaaattcaggaaatacagagaacaccacaaagatactccttgagaagagcaaccccaagacayataactgtcagattcaccaaagttcaaataaaggaaaaaatgttaagggcagccagagagaaaggtcgggttacccacaaagggaagcacatcagactaa

SEQ ID NO: 16440 - DNA, 201 bp, Homo sapiens
ctaactatcctaaatatatatgcacccaatacaggagcacccagattcataaagcaagtccttagagacctacaaagagacttagactcccatacaataakgggagattttaacacccactgtcaatattagacagatcaacgagacagaaggttaacaaggatatcaaggaattgaactcagctctgcaccaagaagacc

SEQ ID NO: 16441 - DNA, 201 bp, Homo sapiens
gattaagaaactcactcaaaaccgctcaactacatgaaactgaacaacctgctcctgaaggactaagggtttaataatgaaatgaaggcagaaataaagaygttctttgaaaccaatgagaacaaagacacaacataccagaatctctgggacgcatttaaagcagtgtgtagagggaaatttatagcactaaatgcccac

SEQ ID NO: 16442 - DNA, 201 bp, Homo sapiens
ttttttgaaaagatcaacaaaagtgatagaccactagcaagactaataaagaagaaaagagagaagaatcaaatagatgcaataaaaaatgataaaggggrtatcatcaccgatcccacagaaatacaaactaccaccagagaatactacaaacacatctacacaaataaactagaaaatctagaagaaatggataaattc

SEQ ID NO: 16443 - DNA, 201 bp, Homo sapiens
caataacaggctctgaaattgaggcaataatcaatagcctaccaaccaaaaaagtccaaaaccagacggattcacagccgaattctaccagaggtacaagraggaactggtagcattccttctgaaactattccaatcaatagaaaaagagggaatcctccctaactcatttcatgagtccagcatcatcctgataccaaa

SEQ ID NO: 16444 - DNA, 201 bp, Homo sapiens
gatctaattaaactaaagagcttctgcacagcaaaagaaactaccatcagagtgaacaggcaacctacagagtgggagaaaaattttgcattctacccatmtgacaaagggctaatatccagaatctacaaagaacttaaacaaattttaccagaaaaaataaacaaacaaccccatcaaaaagtgggcaaagcatatgaa

SEQ ID NO: 16445 - DNA, 201 bp, Homo sapiens
atgggtgcagcaaaccaacatggcatgtgtatacctatgtaacaaacctgcacgctgtgcacatgtaccctagaacttaaagtataataataataaaaatsttaaataaaaaaaagaaaagaaggttatctctaggctgtggaaactggatgattgttaccactttaattcttttctctactttccaaatatttaaaaatg

SEQ ID NO: 16446 - DNA, 201 bp, Homo sapiens
tgcacacgtatgtttattgcagcactgttcacaatagcaaagacttaggacccaaatgcccatcaacgatagactggataaagaaaatgtggcacaggggraggagccaagatggccgaataggaacagctccggtctacagctcccagcgtgagcaacgcagaagacgggtgatttctgcatttccatctgaggtagcag

SEQ ID NO: 16447 - DNA, 201 bp, Homo sapiens
gttcacaatagcaaagacttaggacccaaatgcccatcaacgatagactggataaagaaaatgtggcacagggggaggagccaagatggccgaataggaasagctccggtctacagctcccagcgtgagcaacgcagaagacgggtgatttctgcatttccatctgaggtagcaggttcatctcactagggagtgccagac

SEQ ID NO: 16448 - DNA, 201 bp, Homo sapiens
atagcaaagacttaggacccaaatgcccatcaacgatagactggataaagaaaatgtggcacagggggaggagccaagatggccgaataggaacagctccrgtctacagctcccagcgtgagcaacgcagaagacgggtgatttctgcatttccatctgaggtagcaggttcatctcactagggagtgccagacagtgggt

SEQ ID NO: 16449 - DNA, 201 bp, Homo sapiens
tacgcccacggagtctcgctgattgctagcacagcagtctgagatcaaactgcaaggtggcagcgaggctgagggaggggcgcccgccattgcccaggctygcttaggtaaacaaagcagccgggaagctccaactggctggagcccaccacagctcaaggaggcctgcctgcctctgtaggctccacctctgggggcagg

SEQ ID NO: 16450 - DNA, 201 bp, Homo sapiens
gcggatctctcggcagaaactctacaagccagaagagagtgggagccaatattcaacattcttaaagaaaagaattttcaacccagaatttcatatccagycaaactaagcttcataagtgaaggagaaataaaatacttcacagacaagcaaatgctgagagattttgtcaccaccaggcctgccctgaaagagctcctg

SEQ ID NO: 16451 - DNA, 201 bp, Homo sapiens
aggaagcactaaacatggaaaggaaaaaccggtaccagccactgcaaaatcatgccaaaatgtaaagaccatcgagactaggaaggaactgcatgaactamtgagcaaaataaccagctaacatcatattgacaggatcaaattcacacataacaatattaactttaaatgtaaaaggactaaatatcccaattaaaagac

SEQ ID NO: 16452 - DNA, 201 bp, Homo sapiens
gaaacccatctcacgtgcagagacacacataggctcaaaataaaaggattgaggaagatctaccaagcaaatggaaaacaaaaaaaggcaggggttgcaaycctagtctctgataaaacagactttaaaccaacaaagatcaaaagagacaaagaaggctattacataatggtaaatggatcaattcaacaagaagagcta

SEQ ID NO: 16453 - DNA, 201 bp, Homo sapiens
ccactagcaagactaataaagaaaaaaagagagaagaatcaaatagacgcaataaaaaatgataaaggggatatcaccactgatcccacagaaatacaaaytaccatcagagaatactaccaacacctctatgcaaataaactagaaaatctagaagaaatggataaatttctcgacacatacactctcccaagactaaac

SEQ ID NO: 16454 - DNA, 201 bp, Homo sapiens
ttgtctcagcccaaaatctccttaagctgataagcaacttcagcaaagtctcaggatatacaatcaatgtacaaaaatcacaagcattcttatacaccaayaacagacaaacagagagccaaatcatgagtgaactaccattcacaattgcttcaaagagaataaaatacctaggaatccagcttacaagggacgtgaagg

SEQ ID NO: 16455 - DNA, 201 bp, Homo sapiens
ggtgcagcacaccagcatggcacatgtatacatatgtaactaacctgaacattgtgcacaggtaccctaaatcttaaagtataataataataaaaaaaagaaaaaaaaaaaagaaaatgtggcacatatacaccatggaatactttgcagccataaaaaaggatgagttcatgtcgtttgcagggacatggatgaagctgg

SEQ ID NO: 16456 - DNA, 201 bp, Homo sapiens
ttaaaaaagctaaaacaaaaaaagcaaaacaaagcaaagaacactacctactaggaaaaaaggaagggggccaaatcaatagagcatttagaagccctccyagcccctgcaaaaggactaattaatatatgacaaaaagtttcaatttcactaggaaccaagaagtgtaaattaaaacagccagccagacatcatgattgg

SEQ ID NO: 16457 - DNA, 201 bp, Homo sapiens
cccctaggctggagtgcaatggtgcaatcttggctcactgcaacctccacctcccaggttcaagcgattctcatgcctcagcctcccaagtagctgggacyacaggcgcccgccaccaagcccggctgatttttgtatttttagtagagacggggtttcatcatgttggccaggctggtctcgaactcctgacctggtgat

SEQ ID NO: 16458 - DNA, 201 bp, Homo sapiens
ggcagttgacttggagtttcagcccttcctcaggactttttggcatagtaataacattgcaaagttgctcacatttttcatacccttccattttatctgtgtgtgtgtgtgtgtgtgtgtgtgtttgtgtgtcttgtatgtggaatattcttacagctagtgacttaatatgctgatgaacacagagagctggattttttt

SEQ ID NO: 16459 - DNA, 201 bp, Homo sapiens
taaggatcagtaacttctccgaaataggtaataatagtgctaactgggaggtatttaggacataaaggtgttggggtgtgtgtgtgtgtgtgtgtgtgtgwgagagagagagagagagagagagagagagagagaaataagacatttttgctaaagaatatctgaagaaaaaaaaggccaaggacaaaatgttgtagaaaa

SEQ ID NO: 16460 - DNA, 201 bp, Homo sapiens
agggagtaataaccaaactgttcttctcatgttgttttaaaagcttctggtgtatatgcctttttattttttactcatcatacagtctattcagaaaaataaaaaaaaaaaaaccttaagtagctcttggcagaaggtcaaaaccagcatttcagggaaggtatttaaaagtcttttaagtgtgggctatttgtataagca

SEQ ID NO: 16461 - DNA, 201 bp, Homo sapiens
tgcccaatacctttatctttacctcagctgagcattcttccaccattctcttcttattcttcctttaaattgttaaaaagaaaaattccactttcacttattaaatatgattgagtaccaactgtgtgtaatacattaaaatacaggggagaagacctattagaaagcaattaacaataatacatgaaaagaatataaagc

SEQ ID NO: 16462 - DNA, 201 bp, Homo sapiens
catctttaaatgagtttggatcaaaaagctaattgttcctccagaatcaataaatgcctaaaacacggtcctctatttcttcctggtctatcaaaagcggygttctggcctttcctctttgaaatgggaatgaaaaagaatatgtttcggccttctgaaaaagaatatgtttcagccaacattcataaagttcagaatttg

SEQ ID NO: 16463 - DNA, 201 bp, Homo sapiens
cacggttcggatgactggcagtctgtttaggcgaggcccagaaacagaaagcaagtcttgtgaaagtcagaatctgggagctttgcagatgcgtcaaggtrgccttcagattgcctctctgttttcaatgtgtcccttatctcactcttccaaacatcctatgctgtaagagggtaaaaggaaaaggaaaataagaaagga

SEQ ID NO: 16464 - DNA, 201 bp, Homo sapiens
aaaattcaaaagccatcattgtctgaaacagtataccttattagttcctgagttcattctatgtaattattatattctattggctaagatatgtgcagtaygtttcagatggctttcaaatagtttcatatttcttattagtattggaaggaatgacttcagttttgagaaagatttgcatatgaaaaaagacgtaatttt

SEQ ID NO: 16465 - DNA, 201 bp, Homo sapiens; identical to SEQ ID NO: 2187

SEQ ID NO: 16466 - DNA, 201 bp, Homo sapiens
tgatttattttctttctgcgatcagggcatgctcattgtgaaaagatgaactggacagattgttgtgtgaatttactctttcctgtgggatttctttttcrtatctatacattttccatgagtggaacatctgtaccttcaaaggaagcttcttactggaagaaagattctggatgcgaatcatgctgtatacctgtgttc

SEQ ID NO: 16467 - DNA, 201 bp, Homo sapiens
tagcaggccctaaaataaatcaaagtattttaccccaaaatatatttctttgacatattttgaaatggccctgcaaagctgtctcctgtggggaaaatctrcattctgtaaagaatgctgttccctttccaggtctttttcctgatccaggagagaattaagagtctggcacctttttaagtctgataagaaacatttaca

SEQ ID NO: 16468 - DNA, 201 bp, Homo sapiens
ccacaagactgtcccgagttcaaatgccaatctcaagtagtgagtccccaggtaatccacacttctgtgcaatttgactaggggttcacatgcaaattaagggttcacatgaccccttcctcagattcaataatttgctataacagctcatgtatttcagggaaacacttttgtttactggtttattaaaaaggatattgt

SEQ ID NO: 16469 - DNA, 201 bp, Homo sapiens
cagaaacagaaagcaagtcttgtgaaagtcagaatctgggagctttgcagatgcgtcaaggtagccttcagattgcctctctgttttcaatgtgtcccttrtctcactcttccaaacatcctatgctgtaagagggtaaaaggaaaaggaaaataagaaaggatctacataaggcaaagtacaagtaacataaatgcagac

SEQ ID NO: 16470 - DNA, 201 bp, Homo sapiens
aaaatcttaatgatgtgtattttgtataatcacactgtgagtactacatagagtgcaatgttaactctgccagtaggtgccactaagagcacctggaaaargattctaaggaataatcataggaaaagaaaatgaagagtgcaaaggcttgtaactttgacttgaatctatttctctttaacaattacaggatggttcagc

SEQ ID NO: 16471 - DNA, 201 bp, Homo sapiens
cagtaaaatgcacatcacttaaaagtttagtttgaggagttttgacaaatgtatgcccacatcccagtcaagacatgggacatttccatcactccagaaartttcctcatgcctcctacagtcaatctccactcctcaaagacaaccacagttccgatttctattaccatagaatagctttgctggttgtagaacttcaca

SEQ ID NO: 16472 - DNA, 201 bp, Homo sapiens
aaaaaaaagttgagatgtaatgtacagtaaaatgcacatcacttaaaagtttagtttgaggagttttgacaaatgtatgcccacatcccagtcaagacatrggacatttccatcactccagaaaatttcctcatgcctcctacagtcaatctccactcctcaaagacaaccacagttccgatttctattaccatagaatag

SEQ ID NO: 16473 - DNA, 201 bp, Homo sapiens
tgagaaagaatgttatctttcagaatgttagagcaagccagggaataattataacaaatatcacatattttaaaaataaattaaaacaacttaaacaactrtattgtgtaagcttatataaactgcttaaacaatatataagctacttaaacaagagagttgactgaacattctaaattccaaatgagcaacgttcacata

SEQ ID NO: 16474 - DNA, 201 bp, Homo sapiens
tcttcatctttctaatttgcaacatttgtttccttaccatttaactttggtatgccagcttttcattatgtcagctctcttcttcacagtaccattgtttytgctaataacaccacaataagtagactcaaacatgtaatggtgcaaacaatagtcctaggtgaatgttcagggtgctgtggtatttcttctccatgatgt

SEQ ID NO: 16475 - DNA, 201 bp, Homo sapiens
ttagatgtttctaagagctcaaggaacttggaggaagttgtcagatagttggactgtggaaggtcctgtgcaggttagggactatctgagggtccagtgayagcacgaattctcttggccttgtaaattgctcttctgctctacagttggaaggtggcataaagctgaggacacagacaaatgaattgatattctgagctg

SEQ ID NO: 16476 - DNA, 201 bp, Homo sapiens
gaagacaacagagcactcgaatgttatcatgggccgtttctcagcctaacttcagcattatgagacacttattaagaattttttaaaagtttatcacagtrttagagtgaaataatagggatatgagataaatcaacagagtgttgctggaatgggataaagagaagataaaaatcaatcaagaaaaatgcttcccctttg

SEQ ID NO: 16477 - DNA, 201 bp, Homo sapiens
tttctatgacattaaagaggtctggtgtgaaaattgccactaccctacttccttgctattcctttctgtcagcttcttgaggatatctggatgtgaagcarcttttcttacccttggaacctttgtctacagttctcccttcctcttcctcttcctctatctcactcattctctcctgttttattaagggccgaacattat

SEQ ID NO: 16478 - DNA, 201 bp, Homo sapiens
ctacatttcaagtgctcagtaactgcctgtggctagtggctaccatattgggcagcacattattaggcagtcatagaactgacaaaaaagatttagcacayttcttgattaagatgatgctaagactgtattttggaaattataattctgtatattatttctccttctctatttcttttgtttattttagctattttagat

SEQ ID NO: 16479 - DNA, 201 bp, Homo sapiens
ctggattgaaaatctatcagtgaccagtgaatgctttgccctgattaagaaaaatgaggccaaacaagaagacaacccaaagaagcctctatgtttcttcwctacatcaacttgagaaacgtgggcactgtgacaaccagaaatccagagaggcaactttgaactataaggccaactcaaaaaacgaatccaagtaagaat

SEQ ID NO: 16480 - DNA, 201 bp, Homo sapiens
tgtaaagtttctaaagagcttaacccaaccaatggtcaatgccaggaaaattgtctggttttgagttttgaattgcaccatgcatccaactgcatatacayacccaacagtgggagatttgtgcaaatatccatgattccctgcatacctgcaagtacatttagaagtgaatgcgtctgtaaggaagggaatgaaatattc

SEQ ID NO: 16481 - DNA, 201 bp, Homo sapiens
agagacatctagtcaaacttagttctgtaaacagtcttagatgatataacttagttggaaataacatagctaatcacttgtaaattttagctaagacttakgaggcagaaaaatttagtgattaaaaatggaattaggttgctggatttgaatgccagtttcatgccacacagtctgtgactcttaggtaagtgtgatttt

SEQ ID NO: 16482 - DNA, 201 bp, Homo sapiens
gcagtaagcttgaaaagatcaggagacacacacgtgcacacaaatcaatgctcctgccaaggccagtagattggaggcattcttagatgtctctacttcaygggatattcttgtcattttggcctttccctgacttaatgatggccatatactggcctggggtccttcagctatcaagtgtttagtatctgaataaatatt

SEQ ID NO: 16483 - DNA, 201 bp, Homo sapiens
agccatctcactcttccttggtagacctcaactgcttgcgtagttacttctctgaggcaatgtgattctataatagtgtggctgtcattgaatagcttggraagctgtctgagtgcaggcggaattgattgtcttggtgacctagggcaggctaatgtttggtgtcagatacaccactcaggtttgcactagtcaagaagg

SEQ ID NO: 16484 - DNA, 201 bp, Homo sapiens
actttattcatttaatgatatgtcttagggatttttccatgtaaattcgcagacataaaatgacaaaacttctttgtggcataatattatagtgttctacrgtatggatgtgccatacttaattcacatttccctaaggataggtatttctgctgtttccagtttttccaaaacacctgaaccagttcatagacccaacaa

SEQ ID NO: 16485 - DNA, 201 bp, Homo sapiens
ttatattgccactatttgatggttttaaaaataactttctgctgtaatctatttgctaaatgctgttaaagccatctcactcttccttggtagacctcaamtgcttgcgtagttacttctctgaggcaatgtgattctataatagtgtggctgtcattgaatagcttgggaagctgtctgagtgcaggcggaattgattgt

SEQ ID NO: 16486 - DNA, 201 bp, Homo sapiens
gtagacgatgatgaaggcactgtagacatagtcattgtagacttgggaagtccagaaaaaagtgagaaagggactccttcagttgcatgatgaagttcttytgcgaaacagtaacttggagttctgtttaatttataaaatctttgttagttggttacaatttaaacttatgcctgtgttattaggtaggggttgggattt

SEQ ID NO: 16487 - DNA, 201 bp, Homo sapiens
ttgatgtcgttgcatttttaaagattataataaaatgaggcaaaaaatgtttaaattgtcatttaaaaatttcttatccccagaaagacatccataaaccycaaggtgagaaaacaatactttagacagttatgtaaagcctgttctgtgttttgcctgtttatacctaaagactacatagcaagcaaatctgtgagttgc

SEQ ID NO: 16488 - DNA, 201 bp, Homo sapiens
gaatctataaattactttgggcagtattgccattttttcaatattgattcttcctatccatgagcaagggatgttttttccaattgtttgtgtcctctttkatttccttgagcagtggtttgtagttctctttgaagaggtccttcacatcccttgtaagttgtattcctaggtattttattctctttgtagcaattgcta

SEQ ID NO: 16489 - DNA, 201 bp, Homo sapiens
ctgtgctatgggaccaagccaggggttccctgtctggtgatgagcactggagggtgtgtgggacccatgtgagacagtctggccttcctccttaggtcaaytgcagcttgctggaggtgtgaataaggcacttaggatctttgcttcttcattagtctgagggtagcaagggtagttccactgcagaggcagtggcagaga

SEQ ID NO: 16490 - DNA, 201 bp, Homo sapiens
tgtggattgcttaccacttattaaaattaaaatgcattttaaggtgaaacattatgtacctagaatactgaaggtagcactgaccattgtctttagctcakaaagcaatgttgaattggaaaagcaagatttgagaatattcctctttactgcattgtcattgcactctagtccttctgatttcccttgtttctcagatga

SEQ ID NO: 16491 - DNA, 201 bp, Homo sapiens
ttgcacccatcaactcgtcatttacattaggtatttctcctaatgctatccctctcccagcccccgactcccccagcaggccctggtgtatgatgttcccygccctgtgtccaagtgttctcgttgttcaatttcccacctatgagtgagaacatgcagtgtttggttttctgtccttgtgatagttttctgagaatgatg

SEQ ID NO: 16492 - DNA, 201 bp, Homo sapiens
tgttctttctagtgaccagtccacttgctgaagctatccaggagctgccagccacttaccaacccattagcctgcaaaaagatacttatcactttgaagaktccaaggactttagtagttgtgtgctggggaatagggaagaagactaaaaatgcgtaccgcaatatgacaatccagatgaagcttcatggaggactgcaa

SEQ ID NO: 16493 - DNA, 201 bp, Homo sapiens
tttattaaaaacttattttgatcagctgttctaagtgtggtgttgatttctaacttgttactgcagcacaacatcccatcactttaaacagttgactgagrgctttagtctcccttttctctattttagaccatttcattgatctccaaaacagcttccataaactattaaacaatctgtaagaatactgagtattgctga

SEQ ID NO: 16494 - DNA, 201 bp, Homo sapiens
gtatcagtgatggaagatcaaattaatgaaataaagcgagaagagaactttagagaaaaaagagtaaaaagaaatgaacaaagcatcaaagaaatataggrctgtgtgaaaagaccaaatctacatttgattggtgtgcctgaaagtgatgggagaatggaaccaggttggaaaacactcttcaggctatcatccaggaga

SEQ ID NO: 16495 - DNA, 201 bp, Homo sapiens
taaatattcatcataggctacataaacttatactattgtaagcctggtatttacttgcctgctatatgacaaaactgctaagatacacactctcttaaaaygtacacagtttgagggtgagaggcattattgtactgatgctaaaaaattatcgtgggctcaatcagcagcctgtattcaatactgatgtttcccattgag

SEQ ID NO: 16496 - DNA, 201 bp, Homo sapiens
accatgcctggctaatttgtttgtattgattgattaatttttattatgcttaaagttctagggtacatgtgcacaatgtgcaggtttgttacataggtatrcatgtgccatgttggtttgttgcacccatcaactcgtcatttacattaggtatttctcctaatgctatccctctcccagcccccgactcccccagcaggc

SEQ ID NO: 16497 - DNA, 201 bp, Homo sapiens
ggtgagtactagaaattaatgaacaaaatagacttaataacagataatagaattaaaatgaatttttctgacattatttttagttttctcctagagaatakattttaaggaagatatttgatgctgtgatataaagtaaaccattcttagcatattccttttcttttggaaatgttagatgaaattgcaggcaaagatggt

SEQ ID NO: 16498 - DNA, 201 bp, Homo sapiens
taagctagtgtccttagcccatgtgcctcagtttttgaggtatccattctttcacctgtacttctctcttcattttcttaatgatgtaaactacttgtgaktctcccatctcaacctttgccctcttcagctgctgacttagctttcctacccgataaccatcacacaactctcactgtctaaatgcaggaaccaaatgga

SEQ ID NO: 16499 - DNA, 201 bp, Homo sapiens
cccggtagtgaacatagtacccatagtatccagtaggtagtttttcagcccttctcccttcctttacttccccatctagtagcccccagtggctattgtcmtctttatgttcatgagtacccaatgtttagctcccacttataagtgggaacgtgcagtatttggtttgctgttcctgtgttaattcacttaggataatgg

SEQ ID NO: 16500 - DNA, 201 bp, Homo sapiens
ttgctctaaacttctagatcaaatattgtgaatgcaggaaaaacaattggtttaggagttcacacttatgttactaaatgaatgcttcttgattacatccmcaaagcactcagtgagcattgtcttcaattggtttaatgtaattttcacttttccatatcagtttttaatgtggctacattgctttaattaattttaaaa

SEQ ID NO: 16501 - DNA, 201 bp, Homo sapiens
cttttttcccccctaatttccaaatttcagtattttaatttttgatggattggtgcttattttcctatctttattgatattagatactgacagtgaagaawaatattcaataataaaaatttgtgcttcattttaaagtattttaaatgaataataataataaacatataaccctacatagcttattgtacatttgtttat

SEQ ID NO: 16502 - DNA, 201 bp, Homo sapiens
agaaagaagaatgcccatggagttgaaaaaaatcaatctttctaccatctcaccagttggaaacttcaagtcagttgctaacactcctcatccctgctgcyctcacctactcttcagaatgcaacctatcgtgtcccttgtacatttaaagctctcttaattgatctctctactgactttcaagattaactgatactgagt

SEQ ID NO: 16503 - DNA, 201 bp, Homo sapiens
cccagatactttctcactgttgtctctggggcactggaggataagacaggaacattagagctttatgagctatttggcttcatgccagggacatctcaackttgaaattattttggtgggcatctcttttcagctgcttttctttacctcctcttcaccagtgcatcatcacagggtgctgaaggtcttttcagaaagcac

SEQ ID NO: 16504 - DNA, 201 bp, Homo sapiens
cagaagctctttagtttaattagatcccatttgtcaattttggcttttgttgccattgcttttggtgttttagtcatgaagtccttgcccatgcctatgtyctgaatggtattgcctaggttttcttctagggtttttatggttttaggtctaacatttaagtctttaatccatcttgaattaatttttgtataagatgta

SEQ ID NO: 16505 - DNA, 201 bp, Homo sapiens
attatagagtagctgacagcatcaaaatatgattctttgtaaatctgtaagtactaatattcttaatatatgccaataatttagagaaaaaaagtaaactkcagtagaaaatttccaattaaatctgtagattttggtaaaattacttcctctagcgattaaaattgcattgtaatggttggcaaagttcccggatttggg

SEQ ID NO: 16506 - DNA, 201 bp, Homo sapiens
cagacagaaaaatcaaacagggtaaaggggatgatagtcttggaggaagggagggatgcggttataaatagggtggtcagagtagtcctaactgaaaagawggatttgaatgaagacttgaaagagatgttgggaaccatgcagatgaaagcgggaagtacatcctagggagctagcttgcctgaaggctctaaatgggag

SEQ ID NO: 16507 - DNA, 201 bp, Homo sapiens
ctgccatgtcccctagttcttcaacctctgtatgtacatgctttgagtccaatgttaaaaaggtgacagtttaatcagttctttaacagatggataacaargattgccaacatcctagcctaagagagatccttccagtcctctcgcctttctccgctcagctaattccaccttttagggtctgtcactcttaactccaag

SEQ ID NO: 16508 - DNA, 201 bp, Homo sapiens
aaagttatggttggagaaaaaagccgtctatggaaaagaacaagcattacctgtgtgtgagtcctactagattcatcagacttttgtcttctttgcctcayactttttaaatgtattatcttcagaaaaagcatttttacttgaaaataagtttgtgtttctgctacagcaagttcatctcacattgagttattgtccaag

SEQ ID NO: 16509 - DNA, 201 bp, Homo sapiens
tggaaaagaacaagcattacctgtgtgtgagtcctactagattcatcagacttttgtcttctttgcctcacactttttaaatgtattatcttcagaaaaarcatttttacttgaaaataagtttgtgtttctgctacagcaagttcatctcacattgagttattgtccaagactgccgtggtaaatatagtctgctccacc

SEQ ID NO: 16510 - DNA, 201 bp, Homo sapiens
aaaagcatttttacttgaaaataagtttgtgtttctgctacagcaagttcatctcacattgagttattgtccaagactgccgtggtaaatatagtctgctycacctagaactgaacttattttcatatggattggtcctcctcagaaatttagcatgtgtataaacatgtttctttagctttcaaatgtgaatgagatcca

SEQ ID NO: 16511 - DNA, 201 bp, Homo sapiens
cttctttaagtgtaatatttcttttttaaaaaactgcctttacttccattttgagttatacagtaacaatgctaagtttgtatagctttatgtagaaagtraaaaaaaaaatccttgcttgtccaaagagtttactattttttgaatgagacagaacaagcacaaagatgtttatataaacccaagtgagaattttgactg

SEQ ID NO: 16512 - DNA, 201 bp, Homo sapiens
gcaggaatatggagggagctggctatattgtccgttattgtaattcttagtttccttggattgggttttgccatcctcctgaatctcaatgatctttgttygtgtccatattctgaattctatttctgtcatttcaaccagcctagcctggttaagaactcatgttggagaactggtgtgattgtttagaggacatataat

SEQ ID NO: 16513 - DNA, 201 bp, Homo sapiens
tctctgcatgtgggtgttcctttaactacagtgtagattgaatacagttgatagacttcttttctggatgttttcagcaagccaaggctttgtgcagggtygttctttgaagctgacttcttatctctggcttcagggtggggtatgttagtgaggtatttttggtgttgaagctttggggtgtgatccagtaggtggcac

SEQ ID NO: 16514 - DNA, 201 bp, Homo sapiens
tctttagtgtgtttatcattattacattaccaatctcatatgtacaaatatgtaggactatttctctaaatttaagaatatagagattaaatataaatatwtgagaacaaaatccttaatgttctcactttcaaattataaagtactttttttagtgggaggaaaggggaatgtgcatttcaaggatattagctgtatctg

SEQ ID NO: 16515 - DNA, 201 bp, Homo sapiens
acattaccaatctcatatgtacaaatatgtaggactatttctctaaatttaagaatatagagattaaatataaatatatgagaacaaaatccttaatgttytcactttcaaattataaagtactttttttagtgggaggaaaggggaatgtgcatttcaaggatattagctgtatctgagaatacagggcaatatatgcta

SEQ ID NO: 16516 - DNA, 201 bp, Homo sapiens
aagaaaaaggtctatgatgtgctataatcaggaggtggccttgaaataaatttcaaggccacaagaacctgccttctttcagagaaggcgttcctggcaawtagaagacaacacaaaggcagagatagaaataaacatggcaatcagtctagactttgtaaagatttagtagtcaaaagcagtgtctgtcagttaagcatt

SEQ ID NO: 16517 - DNA, 201 bp, Homo sapiens
taccaatatctctttggccgtcttagaggcctcccaagaacaaaaataaaggaaactaagggcatgttttattgactattggaataatcaggtttttagcrataacatgtagaatatagtaagaaaaaaacttacgtcaaatagtagaataaacataaaaagtccaaagaggattattcttcaagtctattgctgtttcaa

SEQ ID NO: 16518 - DNA, 201 bp, Homo sapiens
ttttctagatagggtattcatctttattttttattgttcttttagtttaggttattttacagttatattttcaaactccttattgctgatcttaaaagccrttgcattttaaactttttaattaaccatcttattctacatttggtagattaaagcattttaaatttattctcttgggtattttagttatacagccatttc

SEQ ID NO: 16519 - DNA, 201 bp, Homo sapiens
taagacttttattcccggtaaaattcccagtggggatctttattgccttattgaacagttggcatcatttttaaaaaggactctttttttcccttcattcrttcttatgccattatttatgtctcagataagccagggtgttaacggttatatcacggcaactcacaatgccaagaaacttctcttcactattttatcagt

SEQ ID NO: 16520 - DNA, 201 bp, Homo sapiens
agcatggttacatgttaagaaagctgtaaaatggggaaatttagtgtttctatatgaaaatgtggatgctaatataattttcctggtgtttcatattcctmgaggtgaatgtaacaagttatttattctgcttttctcctttagctcaattatttattttttataactatcagtactttaaggaatttttctagaaactct

SEQ ID NO: 16521 - DNA, 201 bp, Homo sapiens
acctaaggaaaaaattgacttaaaataatatttatctaacatttattgaacaaatttcagttctcagagctttgaatatattcttatatgggttgacaatwacgatgatacccctgtcctaaggttgtgctacagatctatataaagtacatagcacagtacctggaatacaatatttgctcaataaatgttcctgggaag

SEQ ID NO: 16522 - DNA, 201 bp, Homo sapiens
gcaataggcaaaaccacaaatagcaaacactctaatttcttgaattattttttaactattcccataagcactaggaaatgcccactcctgttttctggtcraagttatcagctcatgtgaatcatagaaagaataaattctacccaaggacctgaaaatatgttaagtcaaaatggcaagtagcaaaattcgcagtcactc

SEQ ID NO: 16523 - DNA, 201 bp, Homo sapiens
aacaaccagctcttgggggaactctcatgggaactgatacagcgagaactcactcattactgccaggatagcaccaagccattcaggaggtatctgcttcmtgacccaaacacctcccattaggccccacctccaacactggggatcagattttaacatgagacttggtgggaccaaacaaacgatatgcaaaccatagca

SEQ ID NO: 16524 - DNA, 201 bp, Homo sapiens
aaatagacaaaacatatatagtgggttctatagtaaaggtttctacaaataacatggaagtatcatagtccagactaggcaggttaagaaaagtcttttcstaggggttgacacctgagatgagacttgaaggacaaatgggcaagggagaaggtacaccagatagaagaaactgcatgtgcaaaggcaaggatgcaagaa

SEQ ID NO: 16525 - DNA, 201 bp, Homo sapiens
tggggtggctaacagattgtaactgggagtcagaatgtctggatttaaatctttgactggcatctcctacctgtgtaacctcaggcaatttgtttaacctstttgaggctaaggcttttgctatttagattaattgttacatatttactcaattctttttttttaattaagggtttactatgtgttaaatgccttcattca

SEQ ID NO: 16526 - DNA, 201 bp, Homo sapiens
ttctgatacaactactacttaaatctcatttataaattttgttccttgtggccaagattctgtggggaaacagtattttcattttgtaaatcttagacttyctattgtatttttttgtattgaaatctgattatttgaattttcatgacaaagtctcatcattttgcttttaattactctatagatttttatttggcagat

SEQ ID NO: 16527 - DNA, 201 bp, Homo sapiens
atatccaggaaaaatcaaccttcagagaaacagaagggattgggaatcgtcaccaagtcactatgcccagacagacttttcatctgttcttctgagtgcarttccaagaaattaactggggaaatttatttgcataataagacaacctttgttctgtgcagttctgtccaccccttaccttcccataacttgttccatcca

SEQ ID NO: 16528 - DNA, 201 bp, Homo sapiens
tatcccttctcctatgaaatgtctgatgtgtcttttgcccattttagggaaccattgtattattttcttattgatttttaggattttaaaaatagtctggrtattagttttgtttgtattatatatagtacaaatattttctgcttatctatctcttgactttcagtttttttactggatattataaaacaaaaagttata

SEQ ID NO: 16529 - DNA, 201 bp, Homo sapiens
cttacactttttagtctcaggatctgtttaaactcttaaaaatattgaataccccttaggagctttgtttaagtggactataaactacatttatcaacacraaacataccataaattaaaatggagaattttaagaaacatgtattaatattaaaaataataatgaatcccttatatgttatcctaagtgatacatttttg

SEQ ID NO: 16530 - DNA, 201 bp, Homo sapiens
caccatgttggccaggctggtcttgaactcctgacctcaggtgattcacccacctcggtctcccaaagtgttgggattacaggcatgagccaccatgcccrgccctttgcccactttttttaaattctttttattttatttttatttttgagacagagtcttgctctgtcacccaggctggagtgcagtggtgcgatctca

SEQ ID NO: 16531 - DNA, 201 bp, Homo sapiens
tttttatttaatccaatgataaattatgagcattacttgtaagaaattaaaattagatggcaaagtactaaaaagagccccaaagtagaatttaggagaamtctgggttctaaatctggttctgctacagactctgttgacctaaggtgagtctctttcatgtgtctgtttcctccatatgtaaaatactaattgtagtaa

SEQ ID NO: 16532 - DNA, 201 bp, Homo sapiens
tgatggaggaatctgctgagcaggctcagcgccgggatgagatgcttcgaatgtatcaagcactgaaagaagcccttgggataattggggacatcagcacrgccaccgtgtccactccggcaccccctccagtggatgactcctggatacagcactctcgcaggtaagaagatggccccggccgggtgcggtggctcgctc

SEQ ID NO: 16533 - DNA, 201 bp, Homo sapiens
taatagagatttgttgagatgctatacaaacaactgtatcaggagaggggaaggcaggtcagggaaggcttcactgaagtaagtcttaaatgattagttartagtctcagaagatgaccaaaatgacattgagaatgtaattgcatgtaacaccatgctaaacactgtatgaaacaagttaagtgggtgtgacctgcgccc

SEQ ID NO: 16534 - DNA, 201 bp, Homo sapiens
gcctaattcaatattaccatatccctctgggtaaataactcatttagctatctttataatccactgagggatgtacaaaggtaagatgaaccccaaatcawtttggaattatgaacattcaaaacaaaataaaatgcaaagttttctatctccacttggtcttacatataataataggtgtcaggaagttccttcttatag

SEQ ID NO: 16535 - DNA, 201 bp, Homo sapiens
gcatatgaaaaaagacgtaattttcattaaaactactagataaatgaaaggtgacaatgttaaaatcattacagatcataaccacttctgctggcctgtaygtgcatgagcatgtgtgtaatggctctttctcagtgtccttggaacaatgttctgctagatattctacttgtttctttacctttctctttttctctttct

SEQ ID NO: 16536 - DNA, 201 bp, Homo sapiens
aatggaatgaattgtttagaatgggaggagggtaaaggagttgacactaaatgatttgcatttcatgaattaaaaatcatttccaacaaattagagggttmattaataccatattaattactctctctctctctctctgtgtgtgtgtgtgtgtgtgtgtgtgtgtgtgtgtgatcataggtagcttagcttttcttcctt

SEQ ID NO: 16537 - DNA, 201 bp, Homo sapiens
tcatctagcattaggtatatctcccaatgctatcccttccccctcccctcaccccacaacagtccccagagtgtgatattccccttcctgtgtccgtgtgwtctcattgttcaattcccacctatgagtgagaatatgcggtgtttggttttttgttcttgtgatagtttactgagaatgatgatttccaatttcatccat

SEQ ID NO: 16538 - DNA, 201 bp, Homo sapiens
taatgtttccttagatgagcaggacagattcatctttccacatacattaagagtagtgcacacacatgtgcacatatacatataacctggggtatatggarcaatcctgctatttgttttctcaaagacagccaaattgatctgcttcatccatctttagactatatttaaagtttgggagctaatcctctaaactccaag

SEQ ID NO: 16539 - DNA, 201 bp, Homo sapiens
gtaaaacaactatttttcactttatagatagtatcctactatttttatatagaataactttctcttgtataccctgagacatccaaatttgtttacttttwcctccaggttttacttccagtattttaatccgttttcttaatatctgctaaatattcaagctctccctttcatttgagcagtagagcctcaggcaaaatg

SEQ ID NO: 16540 - DNA, 201 bp, Homo sapiens
ggtaagtatactattgttattttacaaaggaaagtacaggtaaaagagagttcagtaacttgtttaaggtcctgtagctagtgtcaagactaaactctttyttacttgtacttcattgtcttttaatcatagcacattattaatgtggaaattgataaagacatttttgttggaagtttaattgaactttgaacttgaaaa

SEQ ID NO: 16541 - DNA, 201 bp, Homo sapiens
tctaccatgttagtctactctttggttttcctgctcttgcccctacctccaacccatagctccacagagcagctaagtgttcttttaaataagacgtgccwtgtctcatgtcaaggaaaacttcctagaagaacctataaaaaataatgtagtacgatgtttttgttatacttcaagaattgagactttttcatggagaga

SEQ ID NO: 16542 - DNA, 201 bp, Homo sapiens
agtagaaacactttatcattctcaattgacctagagttcattgtactgtttctgtaactttacgtgtgatataaaaatttggttttccccatgctttatcyttagtcagaaaaaaaatcccactagatatgagaccaattgacacctgatatattgttgtccagaggcaaacacaagtgaactggtggcactcaggcatga

SEQ ID NO: 16543 - DNA, 201 bp, Homo sapiens
cagcagaccacagtgattgacttaatttggaggttaaaatgttctttctctggtagtttctattatcactgcgacttttcccgggacacaagatcagtctscccatgcttaacccagaggagttaggccagttttctgttgctgaaattcactttgcttattttcactagcaaactggtttcataagcataatcttgccag

SEQ ID NO: 16544 - DNA, 201 bp, Homo sapiens
agaagcaaaatttaaataacgtttactagagttgctttagccaataagagccaggaaattaaaaatgaaaatgtaaatgcttcatctttcactcagaaacrtgccttaaatgcctacctccagcaatgtaagaaaaacattgaggatttagctgagagtttgatggcttttgcttgcctgtcataacttcattgctgctca

SEQ ID NO: 16545 - DNA, 201 bp, Homo sapiens
ttcattttaatatttcaaacactctaaattactccatcactatcttaataattaatgcatgaaaactcatacttacattgaaaattcattttaaagcacartatctttgaataaacccattgaaatagtgtttctggtgtttgcttaaaactttggtgtataactgattacatcttatagatttcatttttttttcctggt

SEQ ID NO: 16546 - DNA, 201 bp, Homo sapiens
ttcctaatacggtggtttagaaagagtatatttctttggctgattttccccatgttgtcttaaacaaataaacattatttccaaactattaggcaaatgcyctaagctcatttttcctgtggtgcatggatgagggtaattgttagagaaggaaatcactgatagtacatatatcaataagaaaattcttctaaattgcaa

SEQ ID NO: 16547 - DNA, 201 bp, Homo sapiens
aaatgaaaatgttataggaaaaagctaattaaaatttgtgtgagtcagttattaacacagtaagtcattaggtaacagaatctaattttaacccatttttygaggctgccttttatctttatttagcaatgaatgaagttacttgattaggttcaatgactggcccagggtcaatcacacagtaaattaaaatagcaaaag

SEQ ID NO: 16548 - DNA, 201 bp, Homo sapiens
gctgacctagtgattctacaagtcctataccatttgtaagaatcaacaagactgatacaataaaatttattttaaatcttcaggatacagatacaagtgawtatatttatgaagatttagagatttataaaatttaatcgagagattatttcatttttaaaacctattttttcttcttattaaagaaaatacatgttcatt

SEQ ID NO: 16549 - DNA, 201 bp, Homo sapiens
cgattaataaatggtaattctttttcttcatatttaccacctgggctaatagaagtgacagaagcctatcatgtggtgcacttaaaactgaccttttaatycatcaggtatgaaggtcaggcagaaagaaaatgttggtgctacacaactcatctctcagtcttcaaattcctcatgctcttttttttgctgttgttaaaa

SEQ ID NO: 16550 - DNA, 201 bp, Homo sapiens
agtaagaaaaattctttaatctctactcttttcctctaaccctgggctctgtggagcatgggagaatatacagtctctacctgaaaggcataaaaaagagractcagtttaaataaaggcaaggaagtgagagctattgtttagacaagagtgtgagtgtgttggagtaatttggtgacaataaagatggttccagatggc

SEQ ID NO: 16551 - DNA, 201 bp, Homo sapiens
ctcccttttccctgcacccccaccggcaggccccagtgtgtgatgttccccaccctgtgtccatgtgttctcattgttcaattcccacctatgattgagarcatgcggtgtttggttttctgtccttgcgatagtttgctcagaatgatggtatccagctccatccatgtccctataaaggacatgaactcatcctttttt

SEQ ID NO: 16552 - DNA, 201 bp, Homo sapiens
tagaaagcttatagtagattataatacagggatttcttaagggtcattagggcttgtttatatatttttattttctctgttgggtcgaaaatgaagtgacstctctagttaataggaaataatgtttaggacttcatagctgtttcaacatatttgctctcacatattgtaatgtacacatcccaatattgtagacatctc

SEQ ID NO: 16553 - DNA, 201 bp, Homo sapiens
acaaataatagcaaatagctctgtcattgttctctttggggctctaaattgttgaagcttcagccattgcagggaaagccttcctgagtttcaggggaccmagccctgccctgagtttcacctgactgatagaggaaaacagccaagacaggagtctggcagagaagccactggccagtgaaaaatgcacagtagaggatt

SEQ ID NO: 16554 - DNA, 201 bp, Homo sapiens
ttgacacgcccttcaaaataatcagatgaaaacaaggaacacaaatatgtccagccctgaactcttcatttttcctcttgatgaatcctttcttatgcttyaaaacacttgagtttacacacacacacacacacacacacacacacacacacatatttctggtaggcgtggagatatatatctatatatatcttgctatta

SEQ ID NO: 16555 - DNA, 201 bp, Homo sapiens
tttcatccatgtccctacaaaggacatgaactcatcattttttatggctgcatagtattccatggtgtatatgtgccacattttcttaatccagtctatcrttgttggacatttgggttggttccaagtctttgctatcgtgaataatgccgcaataaacatacgtgtgcatgtgacaaaattgacaaatgggatctaatt

SEQ ID NO: 16556 - DNA, 201 bp, Homo sapiens
attatctgtcttgtttcaggcttttatttcaaagaataagtttatattttggttacttatgttaaggatggaattaaagtgagttgtgtgctgcagcttcsttttagccagtgtggtggtgattttgtgaatttgtgatagcgtggggcccccaggctgaagccagtagtgagacagcaagtgttcaggtatttcagtcag

SEQ ID NO: 16557 - DNA, 201 bp, Homo sapiens
ttgtcagattcaccaaagttgaaatgaaggaaaaagtgttaagggcagccagagagaaaggtcgggttacccacaaagggaagcccatcagactaacggcrgatctctcggcagaaactctacaagccagaagagagtgggagccaatattcaacattcttaaagaaaagaattttcaacccagaatttcatatccagcca

SEQ ID NO: 16558 - DNA, 201 bp, Homo sapiens
ctatccttcagggtctaatggctagttcagagaggttgacattataaggaaagagctcccacactaaaagaaaagattttgaagatttaataatgaggacycttctgcagaaggggtacagcaataggatggaattcagtgcagctgaagtttttgactaaaaatcaaacctcttatgttaatgtgcagttacaaaaaccc

SEQ ID NO: 16559 - DNA, 201 bp, Homo sapiens
ctaaactggaaaaatctgagggcctttattgggtatgacatttgccatttttccttttgtggcttccaaagattattccttcaccttctcatagtcttccwttaaggcccaggtggtgccagctgtacctgttccttatattcactgtcaccaccaagttccaggtcactcccttgcattcatcaggatctttagaacctg

SEQ ID NO: 16560 - DNA, 201 bp, Homo sapiens
caagaaaaaaacaaccccatcaacaagtgggcaaaggatatgagcagacacttctcaaaagaagacatttatgcagccgaaagacacgtgaaaaaatgctyatcatcactggtcatcagagaaatgcaaatcaaaaccacaatgagataccatctcacaccagttagaatggcaatcattaaaaagtcaggaaacaacagg

SEQ ID NO: 16561 - DNA, 201 bp, Homo sapiens; identical to SEQ ID NO: 2184

SEQ ID NO: 16562 - DNA, 201 bp, Homo sapiens
tatccaggaaaaatcaaccttcagagaaacagaagggattgggaatcgtcaccaagtcactatgcccagacagacttttcatctgttcttctgagtgcaaytccaagaaattaactggggaaatttatttgcataataagacaacctttgttctgtgcagttctgtccaccccttaccttcccataacttgttccatccag

SEQ ID NO: 16563 - DNA, 201 bp, Homo sapiens
ggtggtacctaccttaagagcagttaagtattcatccttatgtttgtagcattttaatgcatccattattgacatttttccctgtaacctgtctgagattygtcatggcacatggtaggaggtgaggcactaacttacagagcagagtatagaggctaagagcatagaatctgcaaagtctagttctgccacttgccagcc

SEQ ID NO: 16564 - DNA, 201 bp, Homo sapiens
gtaactatttggcaattttccattggtgttttaaatagctctggcattggtgtaaacatatgctcaatctgtttccaagatttttgtttttctgatgggamctttaaatttcatattgagaaacgtgtttagtatttggtttagagtgacctcaaactttgcttccaagcacttcaacacacacctggcatagccactttt

SEQ ID NO: 16565 - DNA, 201 bp, Homo sapiens
atgaatgatccatctgattagatcctttgtcattgtgggaaattattacattattccaacctgtagaaatttcctaaaatccccacatggagtcccctatsttttctgtcagagtgtatgtagttatgcaagtgcacttaattttatggaacatcctcatgattcaatctgctgctcccaaatcaaaactaatatgctttt

SEQ ID NO: 16566 - DNA, 201 bp, Homo sapiens
cttaatggtgaaacctaaattgtgttgagaatgctagttacaagggagtctgggaaatgaggtttttagttttctggcatctgcagtgtaagaaggcaaayatggagattggaacagaagttgagctggccaatgtgctgtatcagccacagatgcttttgtgttatttcctgtgatggctagaaaacaaacttagaatct

SEQ ID NO: 16567 - DNA, 201 bp, Homo sapiens
ccagttttctataggtggaattgagctagagaggtcatggaagttgatcactgtcaagcagctggtaagaggctgatgcatgataaaagtgcctgtctcaratgccaatagtgtaattctttccattatatcatctatctctgtctgttataagcactttattcagcgataatcatgaacacatgttagacttaaaaaata

SEQ ID NO: 16568 - DNA, 201 bp, Homo sapiens
atccaacgtgggttttaatctgtttttgaattctaagtatctagcgcaagcaaggtgcctagaacatagtatacaataaaaagtgtttgcagaattaattrtatgaataattacatttccccatcctacccaacatatttttttgctagtcattttaatctcatttttttatcaaagctgctaaaaaatagaacttactca

SEQ ID NO: 16569 - DNA, 201 bp, Homo sapiens
catctgactggtgtacctgaaagtgacggggagaatggaaccaagttggaaaacactctgcaagatattatccataacaatattaaccttaaatgtaaatrggctaaatgctccaattaaaagacaaagactggcaaattggataaagagtcaagacccatcagtgtgctgtatcaggaaacccatctcacatgcagagac

SEQ ID NO: 16570 - DNA, 201 bp, Homo sapiens
atacacactgtaagaatttttatgcctagcatcatgctaggcattatatagaaacaaggaaggactcatagtcttacctttgaagatgttgttgctttaayagaagaaaaggtatgaacaaatacaataattaaagctgtcatcaaaccaaggctactcaaataattcaagttatgaaactccctatgtataaattgccac

SEQ ID NO: 16571 - DNA, 201 bp, Homo sapiens
gaaaaagacagcagtaacctctgcagacttaaatgtccctgtctgacagctttgaagagagcagtggttcttccagtacgcagctggagatctgagaacgrgcagactgcctcctcaagtgggtccctgactcctgacccccgagcagcctaactgggaggcacccccaagcaggggcacactgacacctcacacggcagg

SEQ ID NO: 16572 - DNA, 201 bp, Homo sapiens
aatctgggtgctcctgtattgggtgcatatatatttaggatagttagctcttcttgttgaattgatccctgtaccattaggtaatgaccttctttgtctcyttcgatctttgttggtttaaagtctgctttatcagagactaggattgcaacccctactttttttttattttccatttgcttggtagatcttcctccatcc

SEQ ID NO: 16573 - DNA, 201 bp, Homo sapiens
catttcattatccataggtctgatgaaatgcaagccagcctagggaaatggagaaagatccagcagaccagatttcatttaccttgggcccacttcagaayaaatcagaaatacagttatacctagctcttagacagagggaaatcctagaaaatcctggggttgccatggaccagaccttgcctcctagtttccctaggc

SEQ ID NO: 16574 - DNA, 201 bp, Homo sapiens
gggcagagggtggggttcacagatctccacttctcctgatccttgtattattatattctcagaagtgttaagggggcttgtcatccaaaagaccaccaggrtggctaaatagtagaaagaagagctttattagcaatagcagtttgcaaatcaggaagagagtctctggcatcgacccagggtattctccctttgaagtgg

SEQ ID NO: 16575 - DNA, 201 bp, Homo sapiens
attaagggaacagcattttagcagcaacagcaagttgtttatatgatatctgatcccagacattttgcatatctttaacatgatatgaatctatttttgasgtttgtaatgattatggtaaacaaccagatttccttgtgaagtagactcatgttatttctcagaatttatcacattatttatctgtatttcttccctgta

SEQ ID NO: 16576 - DNA, 201 bp, Homo sapiens
aaggaaaatactcatttagatatgtgttctgatgtgtttattaaaagttctaactctgtgtatagagccacacctagaaaaggctatgaactttttgcttsctaggaaagtggtgtggaaacaaacatgagagcctgagagcaggagctggcatcgattacatggtgccgaaatagggctgtggtgattgtgtggtaggtt

SEQ ID NO: 16577 - DNA, 201 bp, Homo sapiens
actggatcaatagtaatccttggtttatgacgcactctcatcattggtccatgcataacctatttatttgtttatttgcttttaataatgtaatacataaraatttcaaatattcatattaggtggagaacttaggagcaaaatgaaaatgtataatttccatatatgcgtggtacaaaaataaactcttatatttcaaaa

SEQ ID NO: 16578 - DNA, 201 bp, Homo sapiens
cttttctgggtctccggcttttcatccttttgtgcagattttggacttcccagcctccataaccatgagagcaaattcattaaaataagctatttctacayaccctatttgctttctagaaagctccaatagggtacaggaagcttgcccatgtatttggtcttacgttagcccaaggaacaagatgctgccttcctctcc

SEQ ID NO: 16579 - DNA, 201 bp, Homo sapiens
ttgacttccttattagtgactttatctgaggcatggtctaccatagtagtgattacactgcccattaaccagtgagtattgatctatttattcctgaaaawtttccctccccatttaaaaataagcagaaataaaaacctggcttcgtcatttgtgatggatgctaaagtcatgactagataaaagacttcaatttatcag

SEQ ID NO: 16580 - DNA, 201 bp, Homo sapiens
tgtttttttttgttgcttgtatgtcttcttttgataagtgtctgttcatgtcctttgcctactttttaatggggttatttgtttttcacttactgaattayttaagttccctataaattctggatattagacctttgtttgatgcataatttgtaaatattttctcccgttctgtaggttgtctgtttaccctattgatag

SEQ ID NO: 16581 - DNA, 201 bp, Homo sapiens
tatggtcagctcaattattttatttcaataatgtgtgtgctttccctgattttcttagaaaacttaagccaatacatgccctggggtctaaggaacaccgycccccaccacctggttgactaaatttatgcataacccaataaggacatcattagagttaaaagaaaggatgaaaattccctagcctcaaagtgttatttt

SEQ ID NO: 16582 - DNA, 201 bp, Homo sapiens
aaaacaactatttttcactttatagatagtatcctactatttttatatagaataactttctcttgtataccctgagacatccaaatttgtttactttttcytccaggttttacttccagtattttaatccgttttcttaatatctgctaaatattcaagctctccctttcatttgagcagtagagcctcaggcaaaatgca

SEQ ID NO: 16583 - DNA, 201 bp, Homo sapiens
aaaatactttacagacaagcaaatgctgagagattttgtcaccaccaggcctgccctaaaagagctcctgaaggaagcactaaacatggaaaggaacaacyggtaccagccgctgcaaaatcatgccaaaatgtaaagaccatcaagactgggaagaaactgcatcaactaacgagcaaaataaccagctatcatcataat

SEQ ID NO: 16584 - DNA, 201 bp, Homo sapiens
gataaagcacttagaacatggcatatactcaataatcattaacttaatttccattacaactctcctctgtacctgtgagacactgcaaatatgtcaactcrtatgttattaatgttacaatgcagcttttctttaagtggtgttattatatttttggtttatatgctactaggagttatgtgctattaggagtcccattga

SEQ ID NO: 16585 - DNA, 201 bp, Homo sapiens
gaaatttaccatttagttataaaattagatgcagcattccatatctcatccaaatataataatctattgggaaatcatattcaggagtggcttctccatcraaggtataattcccttggaagattcacatgtattttatacagtttatccctaaaaatgtttaaagacaagtctgtgtaaaatgtgaagtacttgacttcc

SEQ ID NO: 16586 - DNA, 201 bp, Homo sapiens
cttggaggcagtggaggaagggaccttagtagtgattgtggccaagggtcttttgcttggttcctgggggctccaccccagagagatgcaggtcagcaatygcttagtgcaatcagcccagggtggagggtctgtgctatgggaccaagccaggggttccctgtctggtgatgagcactggagggtgtgtgggacccatgt

SEQ ID NO: 16587 - DNA, 201 bp, Homo sapiens
tgtcatgaagaaagcagcagaaagtaaaagcttctaaattcttcaagaagtcagagattatttttgtattcctgaattgtatgtgtatatataaaatataygtatatatatacaaaagtgaattcaagaatgattttaaaaactgaaagataactgctgaaaaatatagaagccaaaaagccagcttatttgttaacaaaa

SEQ ID NO: 16588 - DNA, 201 bp, Homo sapiens
tcttatggctccagcttccaattttgtatgaaagatttctaaatctacattttctgttgtggcttctgaatgctcattctgtgattccagttgccaccagrtatgtcctttgcatctacaaaatttactaaaaaataaactcattttttccataaaaaccgatttctctgcctcagtttatttgccccaatctatgaagtc

SEQ ID NO: 16589 - DNA, 201 bp, Homo sapiens
cctctgctaccagagccaagtcaagagagtcccaagctcatatgctatatagaatgatccaatttaattttctgtatggccaaagttttgcaatttatcckagtccaagtttgcattgcagtttctcacactctctgcattgatttaaaaattcttatggattatgttatactaaatacattctataaagtagacggaaaa

SEQ ID NO: 16590 - DNA, 201 bp, Homo sapiens
acataaagcatattcatccctaactggagatctctgcagcttaagtcttctggatcatatatggccaggaccaagccaggacaatagtatttaaaagccaratacctaagaggaataccaaactagaaatccataactctggaatgccaaacttgaaattatgatgagttactggtgataccatagtagtatgttaataag

SEQ ID NO: 16591 - DNA, 201 bp, Homo sapiens
aacaggctgtgaaatcagaccttcagagatgagatatttacaattttggagttactaggtacagaaataaaaagttgtttaatatgtttagaaataaagargctttaagtatgagaagaaaagatcaagcagattgggggaatgacttctagaaataaaatataatcactgcaatgaaaaattcaattaaaagtgtcaagg

SEQ ID NO: 16592 - DNA, 201 bp, Homo sapiens
tagacataaacaattggcagaggaaaaaacatagtactcactaacaatagtatttgtagaaattttgaagccatggttaaaaaaagagaaatttgagggamaatgtaaatacatgcagtaataatgctttcttagcaaaattcgcatctttagtctcctgtcaccttattgctttgtaaagaaacatcttgatcccagtca

SEQ ID NO: 16593 - DNA, 201 bp, Homo sapiens
ctccatcatttgttttttcatatttagatctggtcttcctaaagagtttatgaggatagaaactgtgccatatactttactggatctcctgtagtgctagrcatattggaccttagatattttcaaaataatgtacgtaggaatgaataagctattcttaggcgcaaattgtttgtttattctttttgtattagcatttcc

SEQ ID NO: 16594 - DNA, 201 bp, Homo sapiens
caggcacaagccaccatggcctgtgatgagaatttttaagaaaagccattttatcaaatatttcatttaactaaaacacctttaattcagaaagcattatrtctattctaaaagtgtttatatggattaaatagacataaacaattggcagaggaaaaaacatagtactcactaacaatagtatttgtagaaattttgaag

SEQ ID NO: 16595 - DNA, 201 bp, Homo sapiens
agagctttatgagctatttggcttcatgccagggacatctcaactttgaaattattttggtgggcatctcttttcagctgcttttctttacctcctcttcwccagtgcatcatcacagggtgctgaaggtcttttcagaaagcactgagaggaacatcttgattttttttttaaccacagtttagcaactgtgccatttac

SEQ ID NO: 16596 - DNA, 201 bp, Homo sapiens
aggatgtgaatggtataaaaaataagtgagattcaaaagatatatatgtgcatatttaaaggatatatgaatattgaatgtctggtaaaatacagaaaacyagagctgtatagaaaaatttaaatgtaaaaacctatctatttacaagtgaaaaaatacattccaaaatagatccaatggaaattagtatttaacttacag

SEQ ID NO: 16597 - DNA, 201 bp, Homo sapiens
cctgcttccagtctcactctccttaaataaattcagcctgcagttgccatactaatcttcctaaaccactgcttgagcacatcctttctggtgacctttcmagcccaccacatgtcatctcatctccttagcctaacccaagttctccacaatctgaccactcattttgcaattcagccatatactcttcttctcaatata

SEQ ID NO: 16598 - DNA, 201 bp, Homo sapiens
ggcgtgtgccaccatgcctggctaatttttgcatttttagtagagacggcatttcaccacattggccaggctggtctcgaactcctgacctcaagtgatcygcccacctcagcttcccaaagtgctgggattacaggcatgagccactgcacctggccttttttgtgagattttaacagaaaagaaaaaagctataaggaa

SEQ ID NO: 16599 - DNA, 201 bp, Homo sapiens
cttagtgcttcttacataaattgatgagagatagagctgtgatgtgtagaaggtacagaaaacctggttatagatgaaaagaatgcccaggaagctatatkagttcaagtttacatttccatagcacatttaaaaaaataataattttcaatctgtattgccctgtgaaatcataaaaaggttaataaatagaatttttca

SEQ ID NO: 16600 - DNA, 201 bp, Homo sapiens
agtcagggaaacctctctaaagagatgatattttggatgaggaaatgacaggaaggagccacacatgcagagatcagagggacaaacattccagaagaggwgcagcttatagagaggccctgaggtaggaagggacttggtgctcttgagctgcagaagggaggccattgcaagcagagcgactgagtaggtaggatggag

SEQ ID NO: 16601 - DNA, 201 bp, Homo sapiens
tgtgttacctttttatttctgtttattttctcaccaatatgtttctagaacattcacattagctcatatcaccttagcaacctcatctctgtcaaacaccyttgcccttgccctggcctcattatcagcattagccagtcagtcacctgtttgggaaccaagggctcctcaaaatcgtgcagtttgaaatagattttgtca

SEQ ID NO: 16602 - DNA, 201 bp, Homo sapiens
ttatcataacaaatatttctgagctagagttcttatttccattttgtggtggaaaagactaaggcttggagagattacatgatttacccaatttcaaaagytagtaaatggtaaattcaaattctgaaaaggtgcagccagtcccacctgacccatcgtcttcccagtagcattgtcagtaaacgaataatgtaatttata

SEQ ID NO: 16603 - DNA, 201 bp, Homo sapiens
tgacaattataagtggattttcaggcttaattgtgaaacaatatagctaataaataatggacctagaaacacacatagttggagctgtagtctcaccttcmtatacttacagtcaaaatatacacaatgaatataatcagagatttttaaggtataaagtactaaggtttttttccccctcaaaatcagaaatataaagag

SEQ ID NO: 16604 - DNA, 201 bp, Homo sapiens
acagcttgcccaaggctgctcagccagtccctagtggagctggactttaatcccatgcagtctgcttccaaagccatttcctgaccatgaccccagggttwttcagcctcatcagtactgacgtttttgttgtggagggctgtcctgtgtattgtaagatgtttagcagcatccctcccctctaccctctagatttcagtt

SEQ ID NO: 16605 - DNA, 201 bp, Homo sapiens
agatgagtaatactctatctaaaatgaagtatgactgtagattactgagtctgatttttttcagacttggtaaggcttttcactttcaaaggaggaattcyacttgtattgtgtgaaaaagcagcattattacaataagtttgttgcttttcaaatgaacatgaaggaaaatactcatttagatatgtgttctgatgtgtt

SEQ ID NO: 16606 - DNA, 201 bp, Homo sapiens
aggctttaaatcttgctaacttgtgcaagaatgtgcgcgtgtgtatatgtgtgtgtgcgtaggtaaaaatgtaaatgaccactatggaaagaacaatgctrgcttttaaaatctactaaagtaaaagaaataattattcctgaataaggtatgtcaaacaccagtgggaagaaagaagagcgggttattttgtttagagct

SEQ ID NO: 16607 - DNA, 201 bp, Homo sapiens
ttgatatagtgcatctatactcatccatgtaaatgattttgaagaacaaaacaattgacagattttgctttacaatatctgtgatttttgtttcatacctytgtccatctttcaatctttgtaaacagacctagttctttattgcatagaccttataatcccttaataccctgattctaaactgaatgagctttaaaagtg

SEQ ID NO: 16608 - DNA, 201 bp, Homo sapiens
taaattcttggaacttgtttctgtatctataaaactggaatactaatacatgtttcttcagtgtgtgataagaattgtcatataacttatgaagccacttrgtatataccatacttcatcgattctcacattcacttctttttatttaatatttctgaaatgaagatgcatcttatactcaatggcatcttgacatcctgt

SEQ ID NO: 16609 - DNA, 201 bp, Homo sapiens
gattattattcttcctgcaaccagtcagtagcaaattgtcaccagttggaatctgctgaatattcctatatacaagttaatgttagctcaaagaaaggggrgtttaaaaaaaaaagttttgcccagtgtaagcagatacagatttgtagatgacacacaagctagtacttctatttcatcactgcacttcgttgtttccct

SEQ ID NO: 16610 - DNA, 201 bp, Homo sapiens
ctaagatcattttttaccactgcccagaaatacaccagtcagtttggctccactaacatctcatagaaaatgaaaaagaagtttttctgtttttgtttttkttttttttttatagacttcattgctccactcacaagcaagaataagatgtgtaacaagaataagatggaagtgagcgttgttgaacacctggataagaag

SEQ ID NO: 16611 - DNA, 201 bp, Homo sapiens
tttggaagtactcattctgtgaatttatatagaagtagcatttctggccaagcagaaaaaccaactagttggttcattttcctagaaaactaccagatgcyttcctagagataaagcataaccgagtttatttaaaattgagttggtgacttccttgtgtaaaactgactttaaaatatgcatttaacaaaccatatttca

SEQ ID NO: 16612 - DNA, 201 bp, Homo sapiens
gccaaaatgtaaagaccatcaagactgggaagaaactgcatcaactaacgagcaaaataaccagctatcatcataatgacaggatcaaattcacacataamaatattaactttaaatgtaaatggactaaatgctccaattaaaagacacagactggcaagttggataaagagtcaagacccatcagtgtgctgtattcag

SEQ ID NO: 16613 - DNA, 201 bp, Homo sapiens
agcagcagaaagtaaaagcttctaaattcttcaagaagtcagagattatttttgtattcctgaattgtatgtgtatatataaaatatacgtatatatatayaaaagtgaattcaagaatgattttaaaaactgaaagataactgctgaaaaatatagaagccaaaaagccagcttatttgttaacaaaacaaaagaaacag

SEQ ID NO: 16614 - DNA, 201 bp, Homo sapiens
agctcccactggtctgctttacaagatcaccattgaggtttatgctgaccattcttaggagcttttcctgatgggtcactgacaaacatggtgcattcacyatgaactttacgatcttcatgacacaaagtgaagaataaattagaataaattgtgttaagcacatttcattgattcatggagtagaatttcccttcacta

SEQ ID NO: 16615 - DNA, 201 bp, Homo sapiens
gccaaaaagagtgcttaggatgtaaactgctttcagtttcaacctttgattccacttactcgtggttcacggagagctttgtaaggatcagtaacttctcygaaataggtaataatagtgctaactgggaggtatttaggacataaaggtgttggggtgtgtgtgtgtgtgtgtgtgtgtgtgagagagagagagagagag

SEQ ID NO: 16616 - DNA, 201 bp, Homo sapiens
gaagtgcagtggtgtgatctcggctcactcccacttctgcctcccaggctcaagtgatcctcctacctctgcctcctgagtatctggaactacgggcatgyacaagtatgcctggctaatttttaaattttttgtagagaccaggtttcatcatgttgcccaggctggtctcaaattcatgagctcaagtgatctacccac

SEQ ID NO: 16617 - DNA, 201 bp, Homo sapiens
aaaagagtatatatagtatgattctgcagatggtctccaacttacagggttcagcttaacaaattgttgactttatgatggtgtgaaagcaatatgcattyggtagaaactataatttaaatttttatcttttctggtctagtgatatgtggtaggatacttggcagtcagtcaaccatgagatcatgaggtaaacactga

SEQ ID NO: 16618 - DNA, 201 bp, Homo sapiens
cctcttcaaggagaactacaaaccactgctcaacgaaataaaagaggacacaaacaaatggaagaacattccatgttcatggataggaagaatcaatattktgaaaatggccatactgcccaaggtaatttataggttcaatgccatccccatcaagctaacaatgactttcttcacagaattggaaaaaaaccactttaa

SEQ ID NO: 16619 - DNA, 201 bp, Homo sapiens
ttgtggcaataatcaatagcttaccaaccaaaaagagtccaggaccagatggattcacagccgaattctaccagaggtacaaggaggaactggtagcattycttctgaaactattccaatcaatagaaaaagagggaatcctccctaactcattttgaggccagcatcatcctgatatcaaagcctggcagagacacaacc

SEQ ID NO: 16620 - DNA, 201 bp, Homo sapiens
cctttgtttctctccacccacatgctggtgactttttaccactaggagagttatgtactcactgtgactcacagaaaaagataaggttactttatactatmtctcaataaatggagccaaggatccttggagaaattccaggactggggcagagaaagtacaagatgagcctggaatgtctcatgatgctagaaagtaagg

SEQ ID NO: 16621 - DNA, 201 bp, Homo sapiens
aggcttaagttaattgctgcactactgtaaaataatgatacttaaacaaaaatttacttttttaagcactcaatcacagtgagataatggggtaagggaawgggcaccggacttcaagtcagaagattatggattcaactgaatgctgtgtgacctagcacaagatacttaaattcttggaacttgtttctgtatctataa

SEQ ID NO: 16622 - DNA, 201 bp, Homo sapiens
tttttcactttaagttctagggtacatgtgcacaacgtgcagtttgttacatatgtatacatgtcccatgttggtgtgctgtacccattgactcatcattwaaattaggtatatctcctaatgctatccctcccttttccctgcacccccaccggcaggccccagtgtgtgatgttccccaccctgtgtccatgtgttctc

SEQ ID NO: 16623 - DNA, 201 bp, Homo sapiens
caaaaaagagcccgcattgccaagacaatcctaagcaaaaagaacaaagctggaggcatcacactacctgacttcaaactatactacaaggctacagtaascaaaacagcatggtactggtaccaaaacagagatatagaccaatgggacagaacagaggcctcagcaataacaccacacatctacaaccatctctttgac

SEQ ID NO: 16624 - DNA, 201 bp, Homo sapiens
acacactctcctgggatcattacctttccgctctccagaaaatatctgtatatattatttcccccttcacatcctcaacttaaaactaaatgccaaatctrcagccagacctgtgactccgccctgttctaggtctccacagatgcacacactttactcacagctctcttccaccctgtgtctcagcgagaaattccttct

SEQ ID NO: 16625 - DNA, 201 bp, Homo sapiens
agccaagaatactatacctacaaaatctatacttcagaaatgaaggggaaataatgtctttcccagacaaacaaaaactgaggaaattcatcaccactagrccagcattacaaaaattattaaagaagtcctacacatggaagcaaaaggatgataattctaccgtcctaaaaacatgcaaaagtgtgaaactcactcata

SEQ ID NO: 16626 - DNA, 201 bp, Homo sapiens
ggtgggtggatcacctgaggtcaggagttcaagaccagcctggccaacatggtgaaatcccatctctacaaaagtacaaaaattaactgggcatgatggcrggtgcctgtaatcccagctacttgggaggctgaggcgggagaattgtttgaacccaggaggcggaggttgcagtgagctgagattgcaccattgcactcc

SEQ ID NO: 16627 - DNA, 201 bp, Homo sapiens
gccctggtgtgtgatgttcccctccctgtgttcatgtgttctcattgttcaactcccacttatgagtgagaacatgcggtgtttggttttctgttcttgtrttagtttcctgagaatgatggtttccagctttatccatgtccctgcaaaggacataaactcatccttttttatggctgaacagtattccatggtgccctc

SEQ ID NO: 16628 - DNA, 201 bp, Homo sapiens
gtctttgttctcattggtttcaaagaacatctttaattctgccttcatttcattatgtacctggtagtcattcaggagcaggttgttcagtttccatgtarttgagcggttttgagtgagtttcttaatcctgagttctagtttgactgcactgtggtctgagagacagtttgttataaagtctgttgttttacatttgct

SEQ ID NO: 16629 - DNA, 201 bp, Homo sapiens
gtgatgaacatcgatgcaaaaatcctcaataaaatactggcaaaccgaatccagcagaacatcaaaaagcttattcaccacgatcaagttggcttcaccakgggatgcaaggctggttcaacatacacaaatcaataaacataattcatcacataaacagaaccgaagagaaaaaccacatgattatctcaatagatgcag

SEQ ID NO: 16630 - DNA, 201 bp, Homo sapiens
ttttccttccgttaccattgaggagaatttttaaacccatagcctttgattttactgtgaagcacattgatgtaatagtgagaatcatgccctaagtctgrgtttaccagaaattcagctttcgaatcacatccttcccaagtccctgtcagctgtgagcaatagcaaatcatttttccagtagcttaggagcctgtgaat

SEQ ID NO: 16631 - DNA, 201 bp, Homo sapiens
ttcttctttcaggatgttaacaaagaagaatcaagtagctattatcagaattcagttttgttttctgtggaaatctctttccctaacaggttataacaatycagtggtgtgcttgtcaaatttcagcattacctttatgttgaacatttaaaaaaataataacagtagcctacattttaaatatacttagtatgaaatggg

SEQ ID NO: 16632 - DNA, 201 bp, Homo sapiens
ttcacagtttctcttgatcatgatgttcattgacatttggttttctaaataaaaaagaaagtttgattactattgaagaaaagttggggggaacatctcaytgtgaaatatttggtcgtattttgatatgttaagttgttgcttttcaatgtgtaaaaagcttttcctcttgggattattttacagtctacctctaactaa

SEQ ID NO: 16633 - DNA, 201 bp, Homo sapiens
gtgcagtggtgtgatctcggctcactcccacttctgcctcccaggctcaagtgatcctcctacctctgcctcctgagtatctggaactacgggcatgcacmagtatgcctggctaatttttaaattttttgtagagaccaggtttcatcatgttgcccaggctggtctcaaattcatgagctcaagtgatctacccacctt

SEQ ID NO: 16634 - DNA, 201 bp, Homo sapiens
agacagcacaaaaggtgtcccgccagctccctgttgggctttaatattacaaaggcaataactgaacttttagagacaagagattctgccattcagcatgkgcttgtgcatagttttcttctggataattcacgacttcattagcaagttatgatcttgacttttaagagcatatatacttttatgttaacgccattcaaa

SEQ ID NO: 16635 - DNA, 201 bp, Homo sapiens; identical to SEQ ID NO: 2188

SEQ ID NO: 16636 - DNA, 201 bp, Homo sapiens
aggctaaagaggcaagatgtgctaaagaggcaagattccaaaagatctcaaatggtaaaaatcaaaagtttgcaatggacatcgtcagaaatattgggctrgagagggagatcaggaagggatcagtacatgttgtcgagaaataagtgacatgatgtgcaattatgtatgtgctcaccactctatactcaacgcccagag

SEQ ID NO: 16637 - DNA, 201 bp, Homo sapiens
tggggaaatgcatttcttcccagatactttctcactgttgtctctggggcactggaggataagacaggaacattagagctttatgagctatttggcttcawgccagggacatctcaactttgaaattattttggtgggcatctcttttcagctgcttttctttacctcctcttcaccagtgcatcatcacagggtgctgaa

SEQ ID NO: 16638 - DNA, 201 bp, Homo sapiens
ttaaaagacacagactggcaagttggataaagagtcaagacccatcagtgtgctgtattcaggaaacccatctcatgtgcagagacacacataggctcaamatgaaaggatggaggaagatctaccaagcaaatggaaaacaaaaaaaggcaggggttgcaatcctagtctctgataaaacagactttaaaccaacaaaga

SEQ ID NO: 16639 - DNA, 201 bp, Homo sapiens
aaggcaggggttgcaatcctagtctctgataaaacagactttaaaccaacaaagatcaaaagagacaaagaaggccattacataatggtaaagggatcaaytcaacaagaagagctaactatcttaaatatatatgcacccaatacaggagcacccagattcataaagcaagtcctgagtgacctgcaaggagacttagac

SEQ ID NO: 16640 - DNA, 201 bp, Homo sapiens
ccagtaatgggactgctgcgtcaaatggtattgctggttctaggtcattgaggaattgccacactgtcttccacaatggttgaactaatttacactcccamcaacagtgtaaaagcattcctatttctccacatcctctccagcatctgttgtttcctgactttttaatgatttctattctaactggcgtgagatggtatc

SEQ ID NO: 16641 - DNA, 201 bp, Homo sapiens
aacaaaaaaaggcaggggttgcaatcctagtctctgataaaacagactttaaaccaacaaagatcaaaagagacaaagaaggctattacataatggtaaakggatcaattcaacaagaagagctaactatcctaaatatatatgcacccaatacaggagcacccagattcataaagcaagtcctgagtgacctacaaagag

SEQ ID NO: 16642 - DNA, 201 bp, Homo sapiens
acaaattggataaatcaaaggcaggagagtgggagacattgtgtttctgatttgatgtcattattggaatcgattgacgaacacaaaccttagcaggaggktatgatgtgacagttaccaagaagcaccatgacagtttgctgttgaaaatgaagcatttattttagaaattctgggaagtggaaggaggaaagatggtgt

SEQ ID NO: 16643 - DNA, 201 bp, Homo sapiens
gtaatggttacaagtactgtttagtgctctgtgcattctcatttgtcctccaacagtaggtactactatcctcatttatggatgggaagattgaggctccragaggttaaggatcatgctctagagggatggagctgggtgtagatgaccctggagacttgctacctccttaggagtgttgcttattttacagtatgcata

SEQ ID NO: 16644 - DNA, 201 bp, Homo sapiens
cattgaactttgaaagattttcttcctcataatgtaaagaaaaggtaaataagatcaactgcatacctatgctattattttgctatgtagtttattatgayggcccatgctgctttcatattatttgaattttattgcccctgctttctctaggactttattaactttgatatagtgcatctatactcatccatgtaaatg

SEQ ID NO: 16645 - DNA, 201 bp, Homo sapiens
ctgatcagacaggaagcggagctcaggtggtaatgctgttgcccacgggtcacctcctgctgtgcggcccagttcctaacaggccatggataggtgttggyctgtggcgcaagagttggggacccctgaactagagtacagtggttatgtgtggttccttttccctttagtcttgcagactccactcatttccaaagttac

SEQ ID NO: 16646 - DNA, 201 bp, Homo sapiens
agcaggttataaacttgtggaactcattagtcccaaaaggtgggactggcaggaaatgtaaatgaattcagaaatcttttagccagatttatgaatgagarccacaaatggctactaagaaaactggggctatacctgacttttacaacagaagtcagagaacagctttgagctcccgcacaggatgactcttgagactta

SEQ ID NO: 16647 - DNA, 201 bp, Homo sapiens
acaaaacaattgacagattttgctttacaatatctgtgatttttgtttcatacctttgtccatctttcaatctttgtaaacagacctagttctttattgcrtagaccttataatcccttaataccctgattctaaactgaatgagctttaaaagtgcctgttaaacaaatagtataaaggatacaataatttaaaatttct

SEQ ID NO: 16648 - DNA, 201 bp, Homo sapiens
agtttgttactcccactagtatttaactggtattaaattcaagattatattttcataatgttgtttggaaaccaaaagaaaataattggtatgaacgtgckttgaaaagttaaaggattatataagtattaattataattatcattaaagtgatttaatagaagtattattctactaaaataaaataagaactgctaaatt

SEQ ID NO: 16649 - DNA, 201 bp, Homo sapiens
ggggaaaaaacagagcagaaaaactggaaactctaaaaagcagagtgcctctcctccaaaggaacgcagttcctcaccagcaacggaacaaagctggacakagaattactttgacgagttgagagaagaaggctgcagacgatcaaactactccgagctacaggaggaaattcaaaccaaaggcaaagaagttgaaaactt

SEQ ID NO: 16650 - DNA, 201 bp, Homo sapiens
gtctcctttgctggcacttcttccacctccttaactgtgaatattcatccccaaatactttcctccctctctttcttgtttcattccattatttattcttycattctgaaagcatttactgagtactcacactaggccaggcactttgctaaacacaaagacaaatttgtttttttctgtacactcattgcttttaagaat

SEQ ID NO: 16651 - DNA, 201 bp, Homo sapiens
aaaaaaggaaggacagaaagaagaaagaaagaaagagagagagagagagaaagacagagaaagaaagaaaggaaaagaaagaaggataaaaagaaaaacasatgcataattctgaaatcacaactgtgatgagtgctacaaaggaaaggtaaatataatagaaaggggaaaaatgtatgacagaggagctggcctggtagg

SEQ ID NO: 16652 - DNA, 201 bp, Homo sapiens
tgtgatgagtgctacaaaggaaaggtaaatataatagaaaggggaaaaatgtatgacagaggagctggcctggtaggactgtcagggaagtgatgcctgaygaagtgatgactgagttgaaatcccaagatagagtaggaattaactgtgcaaagagagatggaaagacagctgcaggcagagagcagcatattcaaaagc

SEQ ID NO: 16653 - DNA, 201 bp, Homo sapiens
aatagaaaggggaaaaatgtatgacagaggagctggcctggtaggactgtcagggaagtgatgcctgatgaagtgatgactgagttgaaatcccaagatasagtaggaattaactgtgcaaagagagatggaaagacagctgcaggcagagagcagcatattcaaaagcattggaagtaagcgtggcacatctgacacacg

SEQ ID NO: 16654 - DNA, 201 bp, Homo sapiens
tcatagtctgatgttctcaccatttgaacattggataatgcacgtgacagggttaggaaactctaagtcagccctctccaactagaggactcctacccccmcagggtattcatgagttattttcccagacagttaattttacttgaagatttaattaggatttgtttgaaggtgagaagcaatgtttgaaatctttctcat

SEQ ID NO: 16655 - DNA, 201 bp, Homo sapiens
gtggaacatttttaatgacctcacattcctttacactgagcagagcgacatggtgcagtaatgcctgtttatctagcctagagagtttgagctggaatgargtttcatgtgtgagaacttttacaaaccatacagagatgtataggttataaggtgttataattaaaaacataaatattatttcagatctcaaatttaagt

SEQ ID NO: 16656 - DNA, 201 bp, Homo sapiens
ttccctgcttctttggtagaagggctaatggactaactaagagagagaataagctaaaagtctggatagccacaactaaatacaccaccacaggagaatcyctcagcttctatggtaattttgaaactaagagaaaataagacagcatgagaaggcattatgctgctttaaatatgacttgggaatggtcttattttacaa

SEQ ID NO: 16657 - DNA, 201 bp, Homo sapiens
ttgttcagtcacgatcttctaggtgactgaaaaacgcatggagttactcatgccaataattattgctactgaattgttccaaagtctcccttcctgcagaraaataagtttcagtaaaatattctagaggattacaagttatctttgcagttcataaatactttcataggctccattgatattcacagttttcagttagaa

SEQ ID NO: 16658 - DNA, 201 bp, Homo sapiens
gcatggagttactcatgccaataattattgctactgaattgttccaaagtctcccttcctgcagaaaaataagtttcagtaaaatattctagaggattacragttatctttgcagttcataaatactttcataggctccattgatattcacagttttcagttagaatgttatttttattgcaaagtttgcatttatatttc

SEQ ID NO: 16659 - DNA, 201 bp, Homo sapiens
gttccaaagtctcccttcctgcagaaaaataagtttcagtaaaatattctagaggattacaagttatctttgcagttcataaatactttcataggctccaytgatattcacagttttcagttagaatgttatttttattgcaaagtttgcatttatatttcttttctgtggattgcttaccacttattaaaattaaaatgc

SEQ ID NO: 16660 - DNA, 201 bp, Homo sapiens
agtgtcccaaaatttgttctcttagagcagacattcacaagaagaagtaggggtcctgcatcacagctgccttccattttacctagaagtgtgctccaacmcgatttatctttgggcccattcacactcattgatctaccgcttgggacactgccctcagcaggtgctgtggaaagctgcaagaggcgtaggagtaatctt

SEQ ID NO: 16661 - DNA, 201 bp, Homo sapiens
actaaattttgagacagttatattttaaactttcaattataatttacaagtaaatcttgcaatgtaaaagaagctactgcatatcctttttatgcaaatarctacccttttaagcagatatcttctctaaaaatgtcagtctttgtatatctttttgaaggctttcttttaatttgggtccacctaactacttatgctgga

SEQ ID NO: 16662 - DNA, 201 bp, Homo sapiens
gtagtagttattcttctgataatgactaacaacaacgacaacaaacactgtagtccagtatcttggtctttataacataaggctaaaactgctttcacccrtgcttaagtctaattcctaaaggtatcaaagtgtttctacaagcatttcttcatccttcttaagatttccagcactttctctttttgtttttactttatc

SEQ ID NO: 16663 - DNA, 201 bp, Homo sapiens
ggcacccagcaacctgtgttttaacaaggcttccagggaactctgatgcaaggtccaatttgagaaccattgccaagagcatatcaatctaactgcccaayagaaaaaattctgcactgaaagtcatgagaccttagtgcaagcacaggaaaggaagaagactgaactacataggcccattctggcttaaaaatttaccag

SEQ ID NO: 16664 - DNA, 201 bp, Homo sapiens; identical to SEQ ID NO: 2183

SEQ ID NO: 16665 - DNA, 201 bp, Homo sapiens; identical to SEQ ID NO: 2185

SEQ ID NO: 16666 - DNA, 201 bp, Homo sapiens; identical to SEQ ID NO: 2190

SEQ ID NO: 16667 - DNA, 201 bp, Homo sapiens
tcacaagacagggatgccctctctcaccactcctattcaacatagtgttggaagttctggccagggcaattaggcaggagaaggaaataaagggtattcarttaggaaaagaggaagtcaaattgtccctgtttgcagacgacatgattgtatatctagaaaaccccattgtctcagcccaaaatctccttaagctgataa

SEQ ID NO: 16668 - DNA, 201 bp, Homo sapiens
ttccaaagtatcaatgaaatgtattatctatcctgaatgtcagtattggtactgtgtattattctgttctcatgctgctaataaagacatatctgagactrgataatttataaagaaaaagagatttcatggactcatagttccacatggctggggaggcctcacaatcatggcagaaggcaaaagacacatcttacatgg

SEQ ID NO: 16669 - DNA, 201 bp, Homo sapiens
catatgtcttgggagggacctggtagaatgtaattgaatcatgggggtggtttcccccatgctattctcatgagaatgagtaaattcttacaagatctgayggttttataaggggcatccccctttgcttggctctcattcttcttgctgctgccatgtgaggagggacatatttgcgtcctacaataccccactctcagc

SEQ ID NO: 16670 - DNA, 201 bp, Homo sapiens
aactagagatgagatttgcatggggagacagagccaaaccctatcaacgggcattccaggggtgtcttagaggcaataccagggtgagaagatgagtttartggacaggtttcctcatagccccacttgctgcaatcagaggagctccactttttaatctatttaatatataggacttgtcagaatttttttttaatcaac

SEQ ID NO: 16671 - DNA, 201 bp, Homo sapiens
aaccttgaaaaaattttagaggaattgctaactagagaaaccagtttagagaagaacataaatgacctgatggagctgaaaaacacagcacgagaacttcrtgaagcatacacaagtatcaatagccaaatcaatcaagcggaagaaaggatatcagagattgaagatcatcttaatgaaataaagcatgaagacaaaatt

SEQ ID NO: 16672 - DNA, 201 bp, Homo sapiens
gaggcggatggatcacctgagatcaggagttcgagaccaccctggccaacatggtaaaaccccatctctactaaaaatacaaaacttagccaatcatggtkgggggtgcctataatctcagctactcaggaggctgaggcaggagaattgctggaacctgggaagcggcggttgcagtgagccgagattgcactattgcac

SEQ ID NO: 16673 - DNA, 201 bp, Homo sapiens
gacctttgtttgatgcataatttgtaaatattttctcccgttctgtaggttgtctgtttaccctattgatagtttcttttttgctgtctaggagatctttygtttaattaggtccctcttgtcaatttttatttttgttgtaattgcttttgagtatttagtcataaattcttgccaagaccaattccaggaaggtatttt

SEQ ID NO: 16674 - DNA, 201 bp, Homo sapiens
gtggtacagcaagaataggcaggagatttgcagtcagaagacctgggttactgaaggtcttgggcaactcatttaactctgagatgggagttctttatctrtgaaacagggagaactcaataaggttgttccccagatcatatgacatgaggtatttgaaagagtttgatacactgtaaagactacagttgttaccactgt

SEQ ID NO: 16675 - DNA, 201 bp, Homo sapiens
gcaggagctggcatcgattacatggtgccgaaatagggctgtggtgattgtgtggtaggttaggaagccaggtggctgactgggctcccctcttcgatttyacacataccctctgtattagtccattttcatactgctgatagggacataccagagactgggtaatttataaagaaaaagaggtttaatgaactcacagtt

SEQ ID NO: 16676 - DNA, 201 bp, Homo sapiens
tcacaatcatggcagaaggcaaaagccatgtcttacatggcagccaacaagagagaaatgagaaccaaatgaaagaggtttccccttataaaaccatcatrtcttgtgagtcttattcactaccacgagagcagtatgggggaaaccatccccatgattcaattatctcccactgtgtctctcccacaacatacgggaatt

SEQ ID NO: 16677 - DNA, 201 bp, Homo sapiens
tgcatctcaaaaaaaaaaaaaaaattttttttggaggctctgagggagaatgtgtttcctgccttttccactttctagaggctgcctgcatttcttggctyatggtcccctttctccatgcatctcggggacccttccccagttatatctccctctgatgcagattggaaatgttctctgctcttaagaattcatgtgagt

SEQ ID NO: 16678 - DNA, 201 bp, Homo sapiens
aaaaaaaaaaaaaaaattttttttggaggctctgagggagaatgtgtttcctgccttttccactttctagaggctgcctgcatttcttggctcatggtccyctttctccatgcatctcggggacccttccccagttatatctccctctgatgcagattggaaatgttctctgctcttaagaattcatgtgagtagagtgca

SEQ ID NO: 16679 - DNA, 201 bp, Homo sapiens
aaaaaaaaaaattttttttggaggctctgagggagaatgtgtttcctgccttttccactttctagaggctgcctgcatttcttggctcatggtcccctttmtccatgcatctcggggacccttccccagttatatctccctctgatgcagattggaaatgttctctgctcttaagaattcatgtgagtagagtgcatccac

SEQ ID NO: 16680 - DNA, 201 bp, Homo sapiens
catgcatctcggggacccttccccagttatatctccctctgatgcagattggaaatgttctctgctcttaagaattcatgtgagtagagtgcatccacttrgataatctagaataatcttcccatcccaaggtccttaattatatctacaaaggcccatttgccacttcaggaaacattcacaggttccagggattaaaat

SEQ ID NO: 16681 - DNA, 201 bp, Homo sapiens
gataatctagaataatcttcccatcccaaggtccttaattatatctacaaaggcccatttgccacttcaggaaacattcacaggttccagggattaaaatrtggacatctttgggaagggcattatagtgaaagagagggacatgtaaattagtgacttaatgcaatatgccaagggcaagaatgaaaatctattcagggt

SEQ ID NO: 16682 - DNA, 201 bp, Homo sapiens
aaaacggttgtttgagaaatgatggttgtaactgaggcactggcagcaaggatggacagaaaatggcttctaggaaggtagaatgggtattatttgggtamcaatttggtgtaggggatgaaggagagagagggaaaaatgaagtgagaatgacttccagattctggattgggattgggcaggcttgtccctgagataggg

SEQ ID NO: 16683 - DNA, 201 bp, Homo sapiens
agaatgacttccagattctggattgggattgggcaggcttgtccctgagatagggagcacactatctctagtgtgagaatgtatttataggattctttgaytgcaagtaaaagaaatatgagttgaattaggttaggcaaagaggagaatttattataagtttattggcggggaggttgtacaaggaactgaggacaggat

SEQ ID NO: 16684 - DNA, 201 bp, Homo sapiens
caagtaaaagaaatatgagttgaattaggttaggcaaagaggagaatttattataagtttattggcggggaggttgtacaaggaactgaggacaggattayagttggacatcagacatgaacaagattgaggatacaggtactatccggatcttccctcttctttccctgtgctcctctccttgtgtctttttacttttct

SEQ ID NO: 16685 - DNA, 201 bp, Homo sapiens
ttgtaggacactcaggtagtattctgggctcctcttggagtacagtctaagttgcagaagagagacagggtctagcaatgtaaatttctgtagtcgccagycttgattcagagttaaagctatgggaaagtcctcaggcagaggacaaacattagacaagaaaatgcccatatatgaaaccctgcgaagcatcagtatttg

SEQ ID NO: 16686 - DNA, 201 bp, Homo sapiens
tctttgtgtcccgatcatcaggcacaggaccccacacacagtcacttctcaatgtgctaaatttcacagaatgcgtccagggtacctggttctggatagayccggtagaaggagatagaccgggagggcaaatggcatgaggagtctcacaggccagagtgattaaaggggtgtatcggggcggtaaaccctacagactct

SEQ ID NO: 16687 - DNA, 201 bp, Homo sapiens
taaattgtagctgtggttttcctcatgactcttaatacagaaacagctaaggaattaattttcgaattaggaatcagcatttcttccactgagcaattcaygagggattaagttaccttaatggccttgcctgaagagtgcagacatttgctaagaaaagcccatttaaaagcattatgaaaactgaaatctgtttcctag

SEQ ID NO: 16688 - DNA, 201 bp, Homo sapiens
gggattaagttaccttaatggccttgcctgaagagtgcagacatttgctaagaaaagcccatttaaaagcattatgaaaactgaaatctgtttcctagtartagaaaaccaggtagaaatgtacagtatccaagaaaaaatgctggcgagattgtactttattctttttatttggctcattcgtgacttgggatgcagaag

SEQ ID NO: 16689 - DNA, 201 bp, Homo sapiens
ttagtgcttggtgatgtgtagaatttagagctgaatattcccacatttcctttggaaatgttagtgttcataaagtacatattcctttctctcaaatgatrttccatctctcagatgatattttttttcctgtatgaactagaaagataagaagcctaacaaagtaaaattgctgacaattggcttgtatccttgagtaat

SEQ ID NO: 16690 - DNA, 201 bp, Homo sapiens
cttcctaatgttataataaaattgtacacatctccccacactagctatgttcttttggaataatttgaaaaaagaaatgtagaagagtaaaatatttaagyttgaatatttttcaagatggaataaaaaatagggacaagtataaaaatcagagcacgtaccagaatgcattagtaatttgttgtactttaaaaagtttta

SEQ ID NO: 16691 - DNA, 201 bp, Homo sapiens
tttgataagttattcagcctaggtggaaaaaattgtatccattttctactgtaacatcttagcattttcttgtcattatccaggaattttgcaataaaaayagtttctttcctaaggatgcaactttcctcttttacacgaaacagttttcattttaagactcgatctaatgtgcagttattgaatgcagccataaaaacc

SEQ ID NO: 16692 - DNA, 201 bp, Homo sapiens
aaaaaccaaaaaataattagccaggtatggtggagcatgcctgtagtgccaactacttgggaggctgaggtaggaggatcacttgagtccaggaggtcaargctgtaagtgagccatgattgtgccactgcactccggcatggctgatagagcaagactctgtctcaaataataataataaacaagaagctactatgttaa

SEQ ID NO: 16693 - DNA, 201 bp, Homo sapiens
gttttaaaatgtaattggattgtttatttaagtatgtttttagagtgcatataactcatttatagaggtgttaagtgaaaactgtactagttgctaatacrcagatgttttaaaatgacacgcttgttagaaatattagtttttcaatgctaattatataggcagaagagtccacattattttattctagtctgagtggta

SEQ ID NO: 16694 - DNA, 201 bp, Homo sapiens
atttatagaggtgttaagtgaaaactgtactagttgctaatacgcagatgttttaaaatgacacgcttgttagaaatattagtttttcaatgctaattatrtaggcagaagagtccacattattttattctagtctgagtggtaaatagactctcaattctgcacaaatagaaaaagttttttgattaatggggacgaaat

SEQ ID NO: 16695 - DNA, 201 bp, Homo sapiens
tctagaaagaaatagattatttttttcctctgctaccagagccaagtcaagagagtcccaagctcatatgctatatagaatgatccaatttaattttctgyatggccaaagttttgcaatttatcctagtccaagtttgcattgcagtttctcacactctctgcattgatttaaaaattcttatggattatgttatactaa

SEQ ID NO: 16696 - DNA, 201 bp, Homo sapiens
ttttctgtatggccaaagttttgcaatttatcctagtccaagtttgcattgcagtttctcacactctctgcattgatttaaaaattcttatggattatgtyatactaaatacattctataaagtagacggaaaaaaggggccaacatttgcttagccattatggggtagcagacatggattctgctagatacttttcatac

SEQ ID NO: 16697 - DNA, 201 bp, Homo sapiens
aagttttgcaatttatcctagtccaagtttgcattgcagtttctcacactctctgcattgatttaaaaattcttatggattatgttatactaaatacattytataaagtagacggaaaaaaggggccaacatttgcttagccattatggggtagcagacatggattctgctagatacttttcataccttctattccttacc

SEQ ID NO: 16698 - DNA, 201 bp, Homo sapiens
ctaacttcctggagcacagtaggatacagagaaaccagagatttgcccaaggtcagaagaaatcagagctaggtttggaacttaatgttaggaactgggargcctgtgccagttcatcatcttctcttcctcctgttattgttttagagcacctccctccaaccctcaccctgcctcctccttttcccatccctttgcatt

SEQ ID NO: 16699 - DNA, 201 bp, Homo sapiens
cctgcctcctccttttcccatccctttgcattgggccagcctttttctcttccgtgatactctctttcattactcttcttgatagttgaccagcagtgacmttgcattttattaccttttttttcccatacagaatagtggagacagggagcagaatttttctcagacttaggcaagttaatttgactgaaatagtatact

SEQ ID NO: 16700 - DNA, 201 bp, Homo sapiens
aattatatgaatgatacaggattgctttagatcttgtttttctctaatatccctgctgcaagtcctctatttccaagggtttaaaatgtacctcagtgctyctttgtgacagtgtgtcatttttatttcccactgcttcaaggtcatgatatacccatgaatagcatatatatacatgatagcagtagctaggtatcctga

SEQ ID NO: 16701 - DNA, 201 bp, Homo sapiens
atttttttagatttctcaaaagtgagtatttgaagaggagtcatcacagcatggtgatggagtgcaggctttgctggcagctcttgagtcctgcctctgaytctcactggtagcatggctcctcattacggaatctagcctcacttggcctcagttccttcatctgcaaaatagggattgcagacttcaccttttaatctg

SEQ ID NO: 16702 - DNA, 201 bp, Homo sapiens
cctcagaagctttgaaaagaatagctttgggtttcttatctagtggaggtttagaaccctgtatatgtgtgtctgtttatgttttctggttaataaaactragacccattctcttcatattttgaaaagaggggcaaaggcttgcaattatttttatagatcctagcattcatggttctgagtcctactaccaggacagca

SEQ ID NO: 16703 - DNA, 201 bp, Homo sapiens
tttttcctcagagtaagttaagaagggaagtggcagaaggatcatgagttccttgcttgcagagtaagtggggagatgagaaggaggaagcaatgcttttstgagtgtccaccagattgtagggacatacgaagagaaaagactggtaaggttcaaccactgtgagaattaggagtatttgtgaatgagttagtctggggt

SEQ ID NO: 16704 - DNA, 201 bp, Homo sapiens
actgcacaggaatctaccgaacagttggttgcctcctctgtctgctcaactatttgcagcttccacgaagccaggagctgtgtctcctttatcattttccrtagtgcagtgccggcatatggcaggagctaactgaatgaatcagctacttgactctgtacaagccatttatctaagctgaaacatacctttgtcatcaat

SEQ ID NO: 16705 - DNA, 201 bp, Homo sapiens
atttatctaagctgaaacatacctttgtcatcaataaattggttgagaatagttgagtgggcttggattagaacggttgttgttttttgagacagagtctygctctgtcgtcccggctgaagtgcagtgagtggcatgatctcagctcactgcaacctctgcctcccaggtgcaagcaattctcatgcctcagccacctga

SEQ ID NO: 16706 - DNA, 201 bp, Homo sapiens
ctcgctctgtcgtcccggctgaagtgcagtgagtggcatgatctcagctcactgcaacctctgcctcccaggtgcaagcaattctcatgcctcagccacckgagtagctgggactacaggagtgcgccaccacacctggctaattttcatatttttagtagagacggggtttcgctatgttggccaggctggccttgaact

SEQ ID NO: 16707 - DNA, 201 bp, Homo sapiens
agccactgcacccgacctgaacagtgctttttaaactgtagattgtgacctaatagtgggccatgatatcagtttagtagatggtgtgtgacagtgttaarcgaagtatcagactacatccaaggtagttataagtaccactttgtgaaagttttgtattagttgcatatttgtatatgcatactaggctgcaatgtaaaa

SEQ ID NO: 16708 - DNA, 201 bp, Homo sapiens
agagctggcagagtgaattggggccctatggaggattgctaagatgaggaattggtactgaatttaggaagcaatgaggagctgttaatgatttgtaagakacattgcagtgtgcctggagtcaggctttaggaagattaagttggccacatattaactggaggatacatagatggagggagacatctgaggtaccagtgg

SEQ ID NO: 16709 - DNA, 201 bp, Homo sapiens
aaataagtttagagagggaaggaatgcattctctctctacttgcaactggtcagatcttccattctaccatcaagctcagggttatccatggaacatcccrtttgaacactctgtctatgctgattttgaccttctcagatgtcctgatgacttatggttcaaaactgtttaaaacttgaatatttctgactgtttcatta

SEQ ID NO: 16710 - DNA, 201 bp, Homo sapiens
atataatggagagctttcagcctttttcatacctgatttatctgcaacatgtgatgccttttattgaacatccactgtgtgccaggcactgtcttaagcascagaaagacagtaataagtgaaaaagcacattccttgtcattttggagcttgcagtctaatgaagaggcatataataaacaaataaaaatgtataattat

SEQ ID NO: 16711 - DNA, 201 bp, Homo sapiens
ttggaggaacttaaggtaagtcagtgtctccagagctcagtcgagagggagaaatatagcaaggaaagatagcagagggaagttcaggtaggctctgttgktgccaaaaatagattttatccagagtgctatggtaagtgactgaaggaaggattttaatcaggttagttatgtaatctgatttacattagagaaagatta

SEQ ID NO: 16712 - DNA, 201 bp, Homo sapiens
tatagatgacaaagtacagaaaagcagaagagagaggcaggacatgcttgagaaagtatggtgagatgggcatcccacagaggagtagggatatcttatcyactgtaactgaaaggtaaagaagctggtgcagacaagaagggtgtatagatttggtggggaatgtagggaagctccagtttaatgaagtgatagcatcag

SEQ ID NO: 16713 - DNA, 201 bp, Homo sapiens
tgcttaaataaaaaaaaaaactaattgtatagcttggagttccaaatttagaatgagaatctttttgtgaggctaaattgttttgtaatgaaattaatcaytcattaatttgcctcttaaaatacagacttatttaaaatctagtgggttttcttaattggacggagagacattcttgtaattcataagaagttatttatc

SEQ ID NO: 16714 - DNA, 201 bp, Homo sapiens
ctttccctacacaatagaatcctaacttcttggcataactttaaaagcttttaatgatctggctaccaactacttcccagcataattttccatttcttttrtacatcataggtagccattctctgaaaccgtccttgtactttctctcctttgtgtcatcactcataccattccctccatctagaatgcttttgctccttc

SEQ ID NO: 16715 - DNA, 201 bp, Homo sapiens
ctcataccattccctccatctagaatgcttttgctccttctattcctcccatttcagttgaatccagcaaatctgtactgagtgtttgctacatgcctaargattgtaccaactactttggttccaaagatgaggataattatcctttccctcaaagatctcacagacttatgtagaagaattggtaaattgaagttgaca

SEQ ID NO: 16716 - DNA, 201 bp, Homo sapiens
tccttctattcctcccatttcagttgaatccagcaaatctgtactgagtgtttgctacatgcctaaggattgtaccaactactttggttccaaagatgagrataattatcctttccctcaaagatctcacagacttatgtagaagaattggtaaattgaagttgacatattgcttcctctataaagctttcctaattttca

SEQ ID NO: 16717 - DNA, 201 bp, Homo sapiens
tgttttaaatataaattatttcatatgccccattttattataagcttctatggcatcatgttatctgggtccttaggtctttaggcatgccacattataaytctcacatagtaggtgttcagtaattttttgcaaggttgtgtacctggtgaatgtgctgagatgacatagatcatgtaggtatcactgtcaaagcagtca

SEQ ID NO: 16718 - DNA, 201 bp, Homo sapiens
ggaacacttaggaagggggtaggagtgtggcctttagggcagggctccctaaaggataaaggagctgaaggtcaggctttgaactgatttgaagaaaactwgtgtctatgttagaggtgattgcttttgaaatttgatataattctggctaatccattgtgaaaatggctactggttaagtagttgaggaatactgtgctt

SEQ ID NO: 16719 - DNA, 201 bp, Homo sapiens
gttaagtagttgaggaatactgtgcttcctgtgcctctgtgattgctttatttcactaaaaatttgtattttaatatggctgttcgtgcttcaaacctcayatatttggaatatgaagtcacatctgcgctaggctccagtaggctgcatccctggtttatccagtccatgattcttctgctaatagccaagtggcattcc

SEQ ID NO: 16720 - DNA, 201 bp, Homo sapiens
ataaaaaaacagcataaggctagaaaaataaaataaaatgcgaaactgaacacaatcaggtacccaaactgcctgtatttgtaatgtgaagtccaaagggraataatctgtgttgaaaggtagtacccaggaagagtttatgaaagaagtatcatttgagatgggccccagagtacgacagaatttgagaagacagagaaa

SEQ ID NO: 16721 - DNA, 201 bp, Homo sapiens
gtccctatctgtaggtaagagaaaatgtggaaagtcgatgtttgctctggaagttatagaaatttccactcagaaggtccttctttctgaagaaatgtttktttttttttaattcaggtccaatttggacaagatactcttgctttttcgagtcagttgaagagcaagataacaggtgaaaagtatttcaagagtttagat

SEQ ID NO: 16722 - DNA, 201 bp, Homo sapiens
taggtttaatatatattaatatatataatatataatatataaatattaatatgtattatataatatatattaatatattatattatattactatataaatmatattaatatattatattaaaatattaataaatatatcatattaaatattatattaattaaatattaataaatatattatattaatatatttatatatta

SEQ ID NO: 16723 - DNA, 201 bp, Homo sapiens
taccactgtttattattgataccttcaacctgcttctgagattcttcttatgagttagagtatccccagaatcctaaatggggaacctcacttccatattmgataagctgatgtcaattacaataaagagtatgagaattataagttagacaaaaggcaagatagttcctttgagaggaaagcatgccttacaactctatg

SEQ ID NO: 16724 - DNA, 201 bp, Homo sapiens
aaattatgaaacctttttgactcttagcttttgaaaaagcaaataataagtctacttatatcatgaagctggtctaaagttcaaaacaaactatataagtraaacaacttgaaaactgtatgcctctacattcatacaaagtatatattcatatttatatgactagtgtacagtattattatcagtatcaaagaaaactaa

SEQ ID NO: 16725 - DNA, 201 bp, Homo sapiens
atagagatgaaaaagagggtaagaaggtctagaaacaagtctggtgtactccaatatttagaagtgtagaagagaagggaaggaacagtcagcaaagaacsatggagaaagagcaatcagtgaagatggagaacaatcagaagagtgtttcagggaagaggaggacaatcgtgtcagatgctgccaagacatagaataatt

SEQ ID NO: 16726 - DNA, 201 bp, Homo sapiens
accctgcctcctccttttcccatccctttgcattgggccagcctttttctcttccgtgatactctctttcattactcttcttgatagttgaccagcagtgrcattgcattttattaccttttttttcccatacagaatagtggagacagggagcagaatttttctcagacttaggcaagttaatttgactgaaatagtata

SEQ ID NO: 16727 - DNA, 201 bp, Homo sapiens
ttggacactaggaaacatcactatgattgtatcatttaaaaatatgaatatatttttgagaaggagcattgttatgcaagaatgctaacactctaccaatrtattttgcactgtcaaaactctctttagaatactgctttaacagctgtatttgcctacaaaaaatacaaataaactgaaaaaatctcagaggaaactcac

SEQ ID NO: 16728 - DNA, 201 bp, Homo sapiens
gtccccagagtgtgatattccccttcctgtgtccgtgtgatctcattgttcaattcccacctatgagtgagaatatgcggtgtttggttttttgttcttgygatagtttactgagaatgatgatttccaatttcatccatgtccctacaaaggacatgaactcatcattttttatggctgcatagtattccatggtgtata

SEQ ID NO: 16729 - DNA, 201 bp, Homo sapiens
ccgctctccagaaaatatctgtatatattatttcccccttcacatcctcaacttaaaactaaatgccaaatctacagccagacctgtgactccgccctgtkctaggtctccacagatgcacacactttactcacagctctcttccaccctgtgtctcagcgagaaattccttctgggccccttgtgagaagagttcagatc

SEQ ID NO: 16730 - DNA, 201 bp, Homo sapiens
gccgatgtgatcaactggaagaaagggtatcagcaatggaagatgaagtgaatgaaatgaagcgagaagggaagtttagagaaaaaagaataaaaagaaaygagcaaagcctccaagaaatatgggactatgtgaaaagaccaaatctacatctgactggtgtacctgaaagtgacggggagaatggaaccaagttggaaa

SEQ ID NO: 16731 - DNA, 201 bp, Homo sapiens
aattaggcaagttaaaggtagagaaaatcttaacatgtaaggaatataaatatatcaaaagccctaaaagtttttaacgatgttggtatagatacacaaakgaaaactaaaatgaatcctagattcagaaatcaatgcttcaaaaagttttaggttacaaggaaaagccacatgtaagctcgtgccttgtgaatcctttgt

SEQ ID NO: 16732 - DNA, 201 bp, Homo sapiens
aaagctacaccttcagtgaaaatggtgaatcaagaaaaatccgcttgccgttaaaaggagaaaatgaggaaagttatttgtctcggcttgcactgtgaatrgaaggagagaaaagtctttgagaatccatttgtataggttcctcattctgtaatttgagattcaaatatgtatcacttacatgcgcaagcagaaccaaag

SEQ ID NO: 16733 - DNA, 201 bp, Homo sapiens
aagggtctccaaccaagcaagaagaaacttttttttttaacctcatcactcaatattcaagtactttttttgaccacccttgttcaccaagtatgatggtktctctttaaaaagacaaaactgaatcattcgaaaggatttgggttttactccagctcatcaaaatgacataaacacaatatggaaaccaagaaatgctcc

SEQ ID NO: 16734 - DNA, 201 bp, Homo sapiens
acaactactatgtgttactggttctactggaaccctgttaacatacttcctcaaacagtttcctgaaagagccaaattcctgaatggtaatctgaccaaawcactaaacaactcctgtggttaaaacagaatccacaggattctgttttcattagaggaagtactaaggtcaagatttgtaaactacaactaaattatgaa

SEQ ID NO: 16735 - DNA, 201 bp, Homo sapiens
tcctgatgaaatggtgatactgaagaggggaatgctaacagaactcagaggtatcccagatctaatgtctttaacaatcaggtgctgttgtttgctttatyatttggatagccaaaattttctttaaattatttaataggctagatggtttagggactggttttagtatttaattgcttatctgaaaattggcaaatttag

SEQ ID NO: 16736 - DNA, 201 bp, Homo sapiens
aggttgttcagtttccatgtagttgagcggttttgagtgagtttcttaatcctgagttctagtttgactgcactgtggtctgagagacagtttgttataawgtctgttgttttacatttgctgaggagtgctttacttccaactatgtggtcaattttggaataagtgtgatgtggtgctgagaagaatgtatattctgtt

SEQ ID NO: 16737 - DNA, 201 bp, Homo sapiens
ccaacatacatgtatatgtgtacatgtgctcacaaaaaaaatcacaaaatgtgtttttctaaagaagcattctattaattgtattccattaagcatactartaccaaaagctttcagaatacttcatattttatagccttataaaagttttattctatctgttgatcattaatatgtagggtctcatgtccacatcagatg

SEQ ID NO: 16738 - DNA, 201 bp, Homo sapiens
gaaataaatgtagaagcttgaggaataaataagtaataaataatattacttggtaatgttgagactctcaaatacagtaatatttcattatctaaagtacrtttgcttagtaaactcagctaccagaaacatcattaccaactagaaagtgagtaatactactaataccaatactaaagtctttaagacccaaaataggaa

SEQ ID NO: 16739 - DNA, 201 bp, Homo sapiens
ttttccctctgctgagggatttttttaaaattttacattacaggtaaatatttgctttgatataatactctataacttttttccttgagaaattgtctttrtataagttgatgtggtattttcaatagtgtgtttttaagctaaaggattccatatattatttatttttaacaaattaaatgatttcccttaacttatttt

SEQ ID NO: 16740 - DNA, 201 bp, Homo sapiens
gggtgctcaaattagatgcagggaaattagttgtgagattagtgtagcagtttatatgatagttggtggaagctggagtggtgatccaaatagacaagagrgggtgaatttaagagatattaagatagaatcaacaggacatggtgaccaacttggagcatgaggatagaggtagaaggaggatggatgattcccaggtgc

SEQ ID NO: 16741 - DNA, 201 bp, Homo sapiens
tcccatttgtcaattttggcttttgttgccattgcttttgttgttttagtcatgaagtccttgcccatgcctatgtcctgaatggtattgcctaggttttyttctggggtttttatggttttagttctaacatttaagtcttttaaccatcttgaattgatttttgtataaggtgtaaggaagtgatccagtttcagcttt

SEQ ID NO: 16742 - DNA, 201 bp, Homo sapiens
tttatgcagacacatgaaaaaatgctcatcatcactgatcatcagagaaatgcaaatcaaaaaccacgatgagataacatcttacaccagttagaatggcratcaataaagtcaggaaacaacagatgctggagaggatgtggagaaataggaatgcttttacacggttggtgggagtgtaaactagttcaaccattgtgg

SEQ ID NO: 16743 - DNA, 201 bp, Homo sapiens
ttgaactcctgaaacttatttggtagatcaaaagctgcactgctgtggaatgcaataaactccatctgtttgaagtattttcagcaatattgcactacttrggagaaccagggtcccattattctctaaaataagacttttattcccggtaaaattcccagtggggatctttattgccttattgaacagttggcatcattt

SEQ ID NO: 16744 - DNA, 201 bp, Homo sapiens
tagggacaaagcaggaagactaactcgagcccatgttgctttttatgatatgtggttttgagtttcagaggagtcgagtgcagtgtgaatcatagaagcarccagctgaaaaatcctcaaccctataacaaaaagcagattttttcccatatttcttccaagtttttatttcacatgcaagtctgagatacaaaatattct

SEQ ID NO: 16745 - DNA, 201 bp, Homo sapiens
gagcagtggatctcttagcacagcattcgagctctgctaagggacagaatgtctccttaagtgggtccctgaccaccgtgcctcctgactgggagacacckcccagcaggggttgacagacacctcatacgggagagctccggctggcatcttgtgggtgcccctctgggacgaaacttccagaggaaggaacagacagca

SEQ ID NO: 16746 - DNA, 201 bp, Homo sapiens
taaagctctcctcagcaaatgtaaaagaacagaaattataacaaactatctctcagaccacagtgcaatcaaattagaactcaggattaagaatctcactsaaaacccctcaactacatggaaactgaacaacctgctcttgaatgactactgggtacataacgaaatgaaggcagaaataaagatgttctttgaaaccaa

SEQ ID NO: 16747 - DNA, 201 bp, Homo sapiens
tcccatccctttgcattgggccagcctttttctcttccgtgatactctctttcattactcttcttgatagttgaccagcagtgacattgcattttattacyttttttttcccatacagaatagtggagacagggagcagaatttttctcagacttaggcaagttaatttgactgaaatagtatactcgtgagtaaagcgtg

SEQ ID NO: 16748 - DNA, 201 bp, Homo sapiens
atgtaaaatgtatttcttactatgggttatcctcaaaattgttgaatgcctctgatctagattaaatctaatattacttctagtcatttatttggttattytctatttaaatggcaggacatatctttttattagagaagacacaattcacactataccattactattccactaggatgaattaaaatggaaataacttta

SEQ ID NO: 16749 - DNA, 201 bp, Homo sapiens
gtagtagaagacagaaaacagacacagcagaacttttggctttgctctttaaatgtaaggatctacttctaaaatcagtcctcatgtatttttatctagakcatgttttgctgatgtgatgattaattttatgcatcaacttggctaggccactatacccagaaatttggtcaaacaccagtctaaatgtcactgtaaggg

SEQ ID NO: 16750 - DNA, 201 bp, Homo sapiens
tgagtttttatcatgatggttgttgtcaaatgcttttcttctgcatctatcgatatgatagtatgttgttttattctttaatatgctgatgtgaaggattmaattaattgattttcaaatgttgaaccctcctagcatacctggaataaatctcacttggttatgatgtgtaattctttttatgtatttttgggcttgatt

SEQ ID NO: 16751 - DNA, 201 bp, Homo sapiens
gatcaaaagagacaaagaaggctattacataatggtaaatggatcaattcaacaagaagagctaactatcctaaatatatatgcacccaatacaggagcamccagattcataaagcaagtcctgagtgacctacaaagagacttagactcccacacaataataatgggagactttaacaccccactgttaacattagacag

SEQ ID NO: 16752 - DNA, 201 bp, Homo sapiens
gagaaaaagtctctgcgttattgtaggagaagaagaggaatagccacagacctgcatacatatttattaaagtgctgatgacccctcatatgcattttttyagcagtctaataatacaagacttaaaatgcttggtacttagcccccaacacataactttgttcttagcattttcagcaaaacttagaagagctacatggc

SEQ ID NO: 16753 - DNA, 201 bp, Homo sapiens
ggctatctcacaggatgtgagttggtttagctttgtaaaatagctctatttttattttagccaaatctctacaagactctcagtcagctccctcccccacyagaatgaaacagcaacaacagcagtgaaacctgactgaaacagcagagtaaatgttggccagaagcctgctgtgatccagcctggcttttagaaggagtc

SEQ ID NO: 16754 - DNA, 201 bp, Homo sapiens
tataaagtactaaggtttttttccccctcaaaatcagaaatataaagaggaaagaaaattagcccatatataaagttaatttttaaaaaattcaattcagrgaattaaaatatttatacactccatgaaggaatatctgactgtatatgaaccataaaaacagatgtgacttctacccatccctgaagcctgagccacctt

SEQ ID NO: 16755 - DNA, 201 bp, Homo sapiens
atttggatttcatgctaaagatcctggggagtcattcagtgatttaaagtctggtaatgatgtgatagaacttacatcactgttaaagttggataggaggstgctcaaattagatgcagggaaattagttgtgagattagtgtagcagtttatatgatagttggtggaagctggagtggtgatccaaatagacaagagagg

SEQ ID NO: 16756 - DNA, 201 bp, Homo sapiens
gaaatcatattcaggagtggcttctccatcgaaggtataattcccttggaagattcacatgtattttatacagtttatccctaaaaatgtttaaagacaastctgtgtaaaatgtgaagtacttgacttccttattagtgactttatctgaggcatggtctaccatagtagtgattacactgcccattaaccagtgagtat

SEQ ID NO: 16757 - DNA, 201 bp, Homo sapiens
attgaagagcaaagatattaaatccatattaattagttatgcctctttacaccaagccctcaactcctaaattattgtccttggtcgtatgtgagagaaartagatagccactgaaaactcatcctcacaatgtgaaaatgtctttctgatgatgcgtgttataatcatggtgaatgaaaggagcagagagtacagtgtca

SEQ ID NO: 16758 - DNA, 201 bp, Homo sapiens
tttccctgcacccccaccggcaggccccagtgtgtgatgttccccaccctgtgtccatgtgttctcattgttcaattcccacctatgattgagaacatgcrgtgtttggttttctgtccttgcgatagtttgctcagaatgatggtatccagctccatccatgtccctataaaggacatgaactcatccttttttatggct

SEQ ID NO: 16759 - DNA, 201 bp, Homo sapiens
tttagtagagacggggtttcaccatgttagccaggatggtctcgatctcttgacctcgtgatctgcccgcctcggcttcccaaagtgctgggattacaggygtgagccaccgcacccggcccagtttccccagttttaagagaatgtattcagaaaatgaaagaatgacacaactttgtcctaattttgagtttccagaga

SEQ ID NO: 16760 - DNA, 201 bp, Homo sapiens
cccttccttccatctttccttcctcctgcctttctgcctccttccttttcttcctccctcccttttttccttccttttaactaatatttttgaacacctgytatgtgccatgtgtagtagtgggaagaaaataaatgacatagtctttgctgtctctgaacttaaactggatactaacagtcccagttatgaaagtgaaaa

SEQ ID NO: 16761 - DNA, 201 bp, Homo sapiens
gtatcgatttctgaaaataaaaatgcctgttcttttttcaaattatgcaatcctgataagcctactaggcatatacatatatatccttttaactaatcackttatcatttttttccaacaaagaatataataaatgaaagtcaccttctgggtgattagtggcagttgacttggagtttcagcccttcctcaggacttttt

SEQ ID NO: 16762 - DNA, 201 bp, Homo sapiens
atactaccaacacctctatgcaaataaactagaaaatctagaagaaatggataaatttctcgacacatacactctcccaagactaaaccaggaagaagttraatctctgaatagaccagtaacaggctctgaaattgtggcaataatcaatagcttaccaaccaaaaagagtccaggaccagatggattcacagccgaatt

SEQ ID NO: 16763 - DNA, 201 bp, Homo sapiens
tttactcacagctctcttccaccctgtgtctcagcgagaaattccttctgggccccttgtgagaagagttcagatctgttcccggcccatatcccatcacrtctcccccacaggatctgaccttgtgaggacttgggctgccccgggagtaatgaatcaccgtcttatttttttaggccatatgtgagttaaattgtttga

SEQ ID NO: 16764 - DNA, 201 bp, Homo sapiens
ttttccccctcaaaatcagaaatataaagaggaaagaaaattagcccatatataaagttaatttttaaaaaattcaattcagggaattaaaatatttatayactccatgaaggaatatctgactgtatatgaaccataaaaacagatgtgacttctacccatccctgaagcctgagccaccttgccaactgattatggcac

SEQ ID NO: 16765 - DNA, 201 bp, Homo sapiens
gttgctgactcaataagttgtgggtcggtgctcttctctgggcaaatcccatctgcattgtctggtaggcaagacttggcaggttcttcttttattgttasgtactattattcctgttgtttatattacagaaggaaatcttcagaaaagcactatccatatagcatttaaaaaccagcaagtattctttactttggggaa

SEQ ID NO: 16766 - DNA, 201 bp, Homo sapiens; identical to SEQ ID NO: 16765

SEQ ID NO: 16767 - DNA, 201 bp, Homo sapiens
ctcctcaccagcaatggaacaaagctggatggagaatgactttgacaagttgggagaagaaggcttcagatgatcaaacttctgcgagctaaaggaggaarttcgaacccatggcaaagaaattaaaaaccttaaaaaagattaggcaaatggataactagaataaccaatgcagagaagtccttaaaagacttgatggag

SEQ ID NO: 16768 - DNA, 201 bp, Homo sapiens
aattagctgggggtggtggcgcacacctgtgatcccagctactcgggaggctgaggcaggagaatcgcttgaattcaggagtcagaggttgcagtgagccragatcacgccactgcactccagcctgggtgacagagcgagactccgcctcaaagaaaaaaaaaaggaggttgtagaagactgtgttctatggtatacaga

SEQ ID NO: 16769 - DNA, 201 bp, Homo sapiens
gatgagtaatactctatctaaaatgaagtatgactgtagattactgagtctgatttttttcagacttggtaaggcttttcactttcaaaggaggaattccrcttgtattgtgtgaaaaagcagcattattacaataagtttgttgcttttcaaatgaacatgaaggaaaatactcatttagatatgtgttctgatgtgttt

SEQ ID NO: 16770 - DNA, 201 bp, Homo sapiens
tgaggaattgccacactgccttccacaatggttaaactagtgtacagtcccaccaacagtataaaagtgttcctatttctccacatgctctccagcacctrttgtttcctgactttttaatgattgccattctaactggtgtgagatggtatctcattgtggttttgatttgcatttctctgatggccagtgatgatgagc

SEQ ID NO: 16771 - DNA, 201 bp, Homo sapiens
agagattctggtatgttgtgtctttgttctcattggtttcaaagaacatctttaattctgccttcatttcattatgtacctggtagtcattcaggagcagsttgttcagtttccatgtagttgagcggttttgagtgagtttcttaatcctgagttctagtttgactgcactgtggtctgagagacagtttgttataaagt

SEQ ID NO: 16772 - DNA, 201 bp, Homo sapiens
cctttttcctccctatcctttcttctttttccttcttcctcctgatttcctcctccttctcagaagcggacacttgcctcgcccagtagctagttctcagyacctcctttctgcctcctccttcccctaaatggtggcagttggcctctccctctcctggtgcctgaagtgggagtgacgagaagggtcagaaaaaggttt

SEQ ID NO: 16773 - DNA, 201 bp, Homo sapiens
tatttagtgttagtcttatgaatgaggtgggaaatcaagatgagtaatactctatctaaaatgaagtatgactgtagattactgagtctgatttttttcaracttggtaaggcttttcactttcaaaggaggaattccacttgtattgtgtgaaaaagcagcattattacaataagtttgttgcttttcaaatgaacatga

SEQ ID NO: 16774 - DNA, 201 bp, Homo sapiens
tattacaataagtttgttgcttttcaaatgaacatgaaggaaaatactcatttagatatgtgttctgatgtgtttattaaaagttctaactctgtgtataragccacacctagaaaaggctatgaactttttgcttgctaggaaagtggtgtggaaacaaacatgagagcctgagagcaggagctggcatcgattacatgg

SEQ ID NO: 16775 - DNA, 201 bp, Homo sapiens
atttgtgcttcattttaaagtattttaaatgaataataataataaacatataaccctacatagcttattgtacatttgtttattagtatcttaatttcttmgcactgaaaacattaacagatacctctataatattctctaatatggtgtattctctaaatttgaaatttcctaatgtaatctttcttaaaagtaggagat

SEQ ID NO: 16776 - DNA, 201 bp, Homo sapiens
gagatcgagaccatcctggccaacatagtgaaaccccatctctactaaaaatacaaaaattagctgggcgtggtggtgcatgcctgtaatttcagctactyaggaggctgaggcaggagaatcacttgaaccagggagttggaggttgcagtgagcccagatcgtgccactgcacttcagtctgggtgacagagcgagact

SEQ ID NO: 16777 - DNA, 201 bp, Homo sapiens
ctttcttaataaaacaatgttctcactataattatagtccacaagcactatgagccacatagtggcatttaagatgctctcaccttcttcagcctccttayacctcactcttagagcatcactactatcccttaaaatatggaaaggtggagaaatctttctgagcttgggcacttccactaactcttattttgctgctgg

SEQ ID NO: 16778 - DNA, 201 bp, Homo sapiens
atttcttccaagtttttatttcacatgcaagtctgagatacaaaatattctgtaaaattttaaggaagccacagtagttcttactgtttggggatttcccrgagagaataatcgtgttcagaatggtccttttttttgccaaaaggtttattatgtgaactgaacggctcaaccaaacagataacaccatctccattttat

SEQ ID NO: 16779 - DNA, 201 bp, Homo sapiens
tatgcagttgacctcaaactacctgggtgcaagagattctcctgccttggcctcccaaagtgctgggattacaggcatgagccactgcacccagtctgtcygttcttaaagctacattttgttaccttaaagtctttcttgtcccaatatattgtttacatacttacaaactactctatgataatttttaaagtatctgtc

SEQ ID NO: 16780 - DNA, 201 bp, Homo sapiens
tatataagtgaaacaacttgaaaactgtatgcctctacattcatacaaagtatatattcatatttatatgactagtgtacagtattattatcagtatcaamgaaaactaaaagtctacagtatatggagcccaaataaaatttggccaaaaagagtgcttaggatgtaaactgctttcagtttcaacctttgattccactt

SEQ ID NO: 16781 - DNA, 201 bp, Homo sapiens
attgggagggtatacagagagaaataaagaaaaaataataatgaatggctgtgttctttggcacatgaatagcagtttccctttcgggacttcaagaatamaaaatgagaggctttaaatcttgctaacttgtgcaagaatgtgcgcgtgtgtatatgtgtgtgtgcgtaggtaaaaatgtaaatgaccactatggaaaga

SEQ ID NO: 16782 - DNA, 201 bp, Homo sapiens
ttctagtgtctttagtcttttgccttctggcttctttttaaacttcatatatacacatgtcttccctggcctaaaagaaacatctttgacccaaccctggwatcttgataaacaccgtgccattcccttcatttttctgccaaactttcacagtatgacttatactttctttcagccccctttccacattctgcacctcac

SEQ ID NO: 16783 - DNA, 201 bp, Homo sapiens
ctctgataaaacagactttaaaccaacaaagatcaaaagagacaaagaaggccattacataatggtaaagggatcaactcaacaagaagagctaactatcytaaatatatatgcacccaatacaggagcacccagattcataaagcaagtcctgagtgacctgcaaggagacttagactcccacacgttaataatgggaga

SEQ ID NO: 16784 - DNA, 201 bp, Homo sapiens
tggatatacagaagacaacagtagacactggggactactggataggggagggaaagaggggacgtggactgaaaaattactttttgggtactatgctcagyacctgggtgacaggatcatttggaccccaaacctcagcatcacataatatactcatgtaacaaacctgcacgtttaccccctgaatccaaaataaaagtt

SEQ ID NO: 16785 - DNA, 201 bp, Homo sapiens
ctgaaggatgagagagaacagaatttattgggagaaaaggaaaaaattctcagcaaagtgagaggggttcctgttaacaggcccccatttcacagattgartcctggtttatcacacagaaataggagaggccaggctcctccccactgcaaatagcaccaacttcccaaggctgcaccctgtcctctcagtgctcaggct

SEQ ID NO: 16786 - DNA, 201 bp, Homo sapiens
agtagagacggggtttcaccacgttagccaggatggtctcgatctcctgacctcgtgattcacccaccttggtctcccaaagtgctgggattacaggtatragccacggcacctggccaggttttctattagttttaaaagttaagcaggaggagagccagaagacaatttcaattctctgttcataagttttcacttctt

SEQ ID NO: 16787 - DNA, 201 bp, Homo sapiens
tgggaggctgaggcgggagaattgtttgaacccaggaggcggaggttgcagtgagctgagattgcaccattgcactccagcctgggcaatagagtgagacytgtctcaaaaaacaacaacaaaaaaaagagttaactgttcttcaagcctggtagatagttacacaaataaggccgcaaatgtttattgggcacctattgt

SEQ ID NO: 16788 - DNA, 201 bp, Homo sapiens
cactgttcctgagtaaattctttgtgttccagtttatgtgtgtatgttagaaagccctaattctttctgcagactctttacatggcccaggggacatattrttctttacccttttagcaccaatttttacaaacacagcatttctctcatttaaaaaaagcgtctgacaagccgctgagtagaagcgactgaacctttagg

SEQ ID NO: 16789 - DNA, 201 bp, Homo sapiens
ggtactttgtcaaaggagtatctgactcttaaggaggaaagtcacattggaacaggtagcacaaaagcagtttagagacatacatgcattgagtcttaatragacttatgaaggattcagataattttataccttaccttttctctctgactctccaaaaaagggattctttaaattacctccatgagattattgtgaagg

SEQ ID NO: 16790 - DNA, 201 bp, Homo sapiens
tcctttgggtatgtacccagtaatgggactgctgcgtcaaatggtattgctggttctaggtcattgaggaattgccacactgtcttccacaatggttgaamtaatttacactcccaacaacagtgtaaaagcattcctatttctccacatcctctccagcatctgttgtttcctgactttttaatgatttctattctaact

SEQ ID NO: 16791 - DNA, 201 bp, Homo sapiens
tatattctttgcctattttagatacttaggaaactctcatttcctagaaggttaaaaccaggaagtaacatccaaatgtaaaaaagtcacttagccaattyattcgtattagtaacaattgattttgtagagtcttgtagagtcttgaaaacaaagaaaaacaatctttcatcaaatatttgattattttgtgtctcaatt

SEQ ID NO: 16792 - DNA, 201 bp, Homo sapiens
gggttcttgagttcttgtctcttgaccaggaagagttagtcacgcagacactctgaaggatgagagagaacagaatttattgggagaaaaggaaaaaattmtcagcaaagtgagaggggttcctgttaacaggcccccatttcacagattgaatcctggtttatcacacagaaataggagaggccaggctcctccccactg

SEQ ID NO: 16793 - DNA, 201 bp, Homo sapiens
ccatcaatgggtctaaataaccttttcaaggttatttatagtagtcagagtatgatacttaaattatgtttgatttagttcttttggtagttaactttttrcagtacaaataataccacaagttatttgagaaatagtcttttagataagataggttataatgaggtgttttatagggggcttttctgaatcttgacaagt

SEQ ID NO: 16794 - DNA, 201 bp, Homo sapiens
tggagtgcagtggcatgatcacagctcactgcagcctcgacctcacaggctcttatctggcatttgggtccaagatgcttaggcatagtctaagtttagtkgtacaattcttcattgagatattagataaactaaaatctttgtggagatttgtttctttgttagatttatactcatttaaaaaatctaatagtactgtac

SEQ ID NO: 16795 - DNA, 201 bp, Homo sapiens
taggagagaactgacttaacagtattggatgctccagtcaatgaacatctttttttttttcatttatttcagtagtctctgcagtatattatagatttcartttacatattttgcatatattttattaaatgtataacggtagaagtactattattggatgatgtgttctatagatgtattttaggtcaagtttgttgata

SEQ ID NO: 16796 - DNA, 201 bp, Homo sapiens
tttgagaagatggtcttacgtttagttgggcgatttgttttcttattttttctatggagatacattagtgcttcaccctaccaggtggcccacttaaaacrggcctcattgaatacaataagaattgaaaagaatctgttatataagagttggccggcatattcaaaccagctggaattcgtcaaaatttctgttcataag

SEQ ID NO: 16797 - DNA, 201 bp, Homo sapiens
attattttccacagcttataaatgaagaaattgaggttctgagacattgacttgcccaagatcacacagctgggggtggcagagttaagactgaaatccargtcttctcactcatagtctgatgttctcaccatttgaacattggataatgcacgtgacagggttaggaaactctaagtcagccctctccaactagaggac

SEQ ID NO: 16798 - DNA, 201 bp, Homo sapiens
tgaaacaatatagctaataaataatggacctagaaacacacatagttggagctgtagtctcaccttcctatacttacagtcaaaatatacacaatgaatakaatcagagatttttaaggtataaagtactaaggtttttttccccctcaaaatcagaaatataaagaggaaagaaaattagcccatatataaagttaattt

SEQ ID NO: 16799 - DNA, 201 bp, Homo sapiens
cttaagtctttgctcagcatttttttttagtggtcaggacagggatcttcttaaatactagagtcagtaaatcgctaaacatttaccaaagctctcaatgygcattttggggtatggcttcaatgctcaggcagacagtttacaactctgccttaatcctaacttcctgcttatgcagagctcaaggtgagctagaggtga

SEQ ID NO: 16800 - DNA, 201 bp, Homo sapiens
tgcagcccatggagggcaagccaaagcaggatggggtgttgcctcacctgggaagcgcatggggttgggaaactccctgccctagcaaagagaagctgggrgggactgtgcctagaggaagggtgcattccagctcagatactatgcttttcccacggtcttcacaacctacaggcaagagattcccttgggtgcctacac

SEQ ID NO: 16801 - DNA, 201 bp, Homo sapiens
aaaatctttgccttttcctatgtccaggatagcattgcctaggttgtattctagagtttttattgttttgggttttacatttaaatctttaatccaccttsagttgatttttgtatatggtgtaaggaaggggtccagcttcagtcttctgcatatggctagccagttatcccagcaccatttattgaatagggagtcttt

SEQ ID NO: 16802 - DNA, 201 bp, Homo sapiens
acgatgagataacatcttacaccagttagaatggcgatcaataaagtcaggaaacaacagatgctggagaggatgtggagaaataggaatgcttttacackgttggtgggagtgtaaactagttcaaccattgtggaagacagtgtggtgattcctcaaggatctagaactagaaataccatttgacccagtgatcccatt

SEQ ID NO: 16803 - DNA, 201 bp, Homo sapiens
tgggaggggcaactttctttttaaagtagagactagaagaaagcttcgtaacttctcctttcccgttcaaccatttgcctaccttagtgccaattatgackgtcagggaatggtgatgtctgtctagtagaaactagctgagatcacatttgaatgttaaaacatagatactttcttttacgctaagtcagacacttcttt

SEQ ID NO: 16804 - DNA, 201 bp, Homo sapiens
caacacttgtttgttctttatggtttaccaatttcactcgttagatcctgacttttaccctgtatcgtagatagggctgagattatgcacctcattttackcacaaggaaactaaagccaaagaacagtgtgtgattttctcagtagccttcaaatatattggcctagaaaatattctgatagataaatagtctaaggaca

SEQ ID NO: 16805 - DNA, 201 bp, Homo sapiens
gagcggacaaatttcatatactatgactaaattcagggaatagaattattcagttatggcaaataaaaatgtatagtattttacagtttttcaaagtgctstctacattcattgtcattggtttttgtaacaattgcctttgagatcaaaaggatacagttacaaataagaaagcgtaggctcagggatgctaactcactt

SEQ ID NO: 16806 - DNA, 201 bp, Homo sapiens
agctagtacacagagggtggtacagcaagaataggcaggagatttgcagtcagaagacctgggttactgaaggtcttgggcaactcatttaactctgagaygggagttctttatctgtgaaacagggagaactcaataaggttgttccccagatcatatgacatgaggtatttgaaagagtttgatacactgtaaagacta

SEQ ID NO: 16807 - DNA, 201 bp, Homo sapiens
gactataattccagaaggagtctttctgaaaaaatcagttgcagagttttatcaaaaagaaacatttcaatttgtagactttgtcaaatttgggggggtawaaaaatgactacccaagataccatatatgaagtcaagtacacaaatacactaaaaaaacttattaatatatttaggaaataaatgtagaagcttgaggaa

SEQ ID NO: 16808 - DNA, 201 bp, Homo sapiens
agaaaccttaaaatcagactgcattgtgaatctccaagagatgagtaatgtctacatatttctcagacttatttgaccatagaacatctcacagatctagwgtcctgaggcacatgccttaggaaactgcttcagtggctttaagccaaaggaaaagacattgagtgtgatttcctcagtacagactctcactaacaaaaa

SEQ ID NO: 16809 - DNA, 201 bp, Homo sapiens
gatataataattatattgaccttttatcatatttattaacaattttttaactttttcttatatagaatttaattttatttataaggttcttgaggtaaagytttaaaaaatgtttgatagtaatgtttattgttctttattctctcatttcttctactgtatttacatttagaaaggtggtacctaccttaagagcagtta

SEQ ID NO: 16810 - DNA, 201 bp, Homo sapiens
ttggtcactgtgatagtatgagggttagcagtggtttctttcctgtgctggctgcttagctatctctgtcattctgtgggaagctctagttttaacatagyttgaggagctcagagacacttccctagatgtaaaaatcactaaatagatgatcttctttgctgttcagttgtaataaggtatttctattagatatatttt

SEQ ID NO: 16811 - DNA, 201 bp, Homo sapiens
gtttccagctttatccatgtccctgcaaaggacataaactcatccttttttatggctgaacagtattccatggtgccctccagctctttactctggagttytgcttttttccctccctgcattcattttgattctcaaattaacctgttcctttttggttaaaaataaaacaaacaaaacaaagtagatgctttgtttatt

SEQ ID NO: 16812 - DNA, 201 bp, Homo sapiens
cgagtagctgggattgcaggtacccaccaccacacctggctaatttttttttgtatttttagtagagatggggtttcatcatgttagccaggatggtctcratctcctgacctcgtgatctgcctgccttggcctcccaaagtgctgggattacaggtgtgagccaccgtgcctggcctttgcccactttttaatggggtt

SEQ ID NO: 16813 - DNA, 201 bp, Homo sapiens
tttcactagcaaactggtttcataagcataatcttgccagactgtatgtcatttttctccctttattgtaggaaatgattgagtgtgtgtgttgaggaaasgattgatgctttgccacctttggagggagcaattattttgtgagaaagcttgagaataattaatttatgttggattgaaaaataattggaagcatttttc

SEQ ID NO: 16814 - DNA, 201 bp, Homo sapiens
atcataaataaaaaacatagtgtgcttttaatatttatatatgtgtctgcagctacgcaccagattgaactattctttttgaaataaatgtaaacattgarccaaccatatttccttgcttatttttggccttctaatgttctggaagcatcctgtgcagctaccagtgatataatcttgtgtgaaaagcaggatctaacc

SEQ ID NO: 16815 - DNA, 201 bp, Homo sapiens
tgcaaatgagtattaatcacatatctttataaacacttattttagtattaatcaactaaaaatgatttccatttgccacacagaatcagattcagtgccayttcactgccactcaggaggagactacaaaagctatagagacaataacatatactgttttctgaatttagaggtttgttttgtttagttagttagtatttt

SEQ ID NO: 16816 - DNA, 201 bp, Homo sapiens
aactgtgtaagataacttgcttaccaatgtacaatgtgattgtgaaataaaagctttgaattaacattcacagtgaaaacactaaagccaagtgtttcggygcccagagcagaaactgtttggtgatttagtgtttgtacagatttaattagttatatttactttcaaaatttcatctttctttaacaaattctacttctt

SEQ ID NO: 16817 - DNA, 201 bp, Homo sapiens
caattgtgattttcctttaataaacatgaccaaatcatacatacctatgtttaggagtaataaacatgcatttctcaacttggtaggccttgtgctttgcaaaaaaaaaaaaacctgtaatatttttataagatcaggaagatcataacattaaattgttcatttacttaagtaaattaaaactttcattccatggcttaa

SEQ ID NO: 16818 - DNA, 201 bp, Homo sapiens
ttgggagtaatagaacctttctcatagagcaggagacccccaacctttttggcaccggggactggtttcatggaagacaatttttccacagatcaggatgrggtggatggttttgggatgattcaagtgcattaaatttattgtgcactttatttctattattattccattgtaatatataatgaaatatgtatacaactt

SEQ ID NO: 16819 - DNA, 201 bp, Homo sapiens
gacttcttataatttataggttgcagttcaaatttgttagtcttggaatgtaaaggtctcttaaattgagccccagcctaccttcccagcattataggttrctattatcctgctccagatccctagccaaactgggctcctccctgacctccagcagggatttccccttctacctcatgaaatctacagcaaccaacgctg

SEQ ID NO: 16820 - DNA, 201 bp, Homo sapiens
cgcatagatgcctaaaaccacagatagtactgaatcctatgcatactatgctttttttccatctgataaccgagacagctactaaataactaacaggtggwtagcaaagacagcatggatacgtcggacagagggatgattcatatcccaggtgggatgatgggagatttcatcatgctactcagattggtgcacagttta

SEQ ID NO: 16821 - DNA, 201 bp, Homo sapiens
agtgggggatgtgtgggacccatgggagatggattggcctcctctccttgggttgactacagcttgttgtagtgtgaataaggcacttagggtttttactycttcattagtgcaagggtagcaagggcagttccactgcaaaggcaatggcagagaggctttcagttgcccctgggggcctggtccaaggaatttccgaat

SEQ ID NO: 16822 - DNA, 201 bp, Homo sapiens
gacttagcgcggtaactggacatttcaaccaatgttgactgaaatgaactgaatttctccagattgtcaactgggcgtgagaactatgtctgagaacaccrcagatataagaagaagaacataagactattatttatattatagattttacatttgataaaggtttaatctaccaagttcttttaactggtttgtttctgt

SEQ ID NO: 16823 - DNA, 201 bp, Homo sapiens
tccccaaaggctgagccacaagctgctctttccagacgctgtgtttagattccttgtgagccctcaagtgctgcatccgctgagaattggtgttgcatttmattgatgtgttccgcctcttttggtcagataaaccgaagcataaacattgtgctgacaaacccgggtcgcagagtggtttttggtcgctgaactgcccaa

SEQ ID NO: 16824 - DNA, 201 bp, Homo sapiens
gtaaatgtccttctcctcctgtgtttaaaacagtgttgagtttgtttttggaaatctgagtttcagagtaaggcttctagaatttaaaaaatcaccttaayatattatttacaaaaatatatcatagtatctcagcattgatttttcaactttatattagcttcatgctttttagagaatacaaagaaagtgtgtacttct

SEQ ID NO: 16825 - DNA, 201 bp, Homo sapiens
ttaaattagtccttctttccttttacagctgccagtggagggcatattgatcagagaaaggaccaaatagacaaaaatgcagaaaacagatctatggtgtraagtgccgaagtaattgatccttacctagtaaatattcacatatgttaacgtaagttaatactgttaggaaactgagaccaatttcataaacaatatgca

SEQ ID NO: 16826 - DNA, 201 bp, Homo sapiens
aggcagttaattttatcagagaaaaaaattggaagataaaagctttggaagatatcagagcaaaaattggaagataaaaaaatgagaggaatagcaaaaamaaatttttaaggtaaaactataaattttcttttgaaattgtacatattcgttggactcaatagtcatcttctcttactggaactaactaagagttagtcc

SEQ ID NO: 16827 - DNA, 201 bp, Homo sapiens
tgcgtcagaaacctagctgttgaaccactgtgtgaatctttaggccatgaggcttaattctaattttaagcagatttggctcttataaatcctaaagagtkataaagccttgagttattttcttgaaaatatctgataattcaatttataatttattcttaacactctctttaaaaaaaaaagaaagaaaacttaaagtat

SEQ ID NO: 16828 - DNA, 201 bp, Homo sapiens
aaacgtgggggtttgtggtatatgatatatacaaaatattacctttataaattctaaaaaaaatctgaattctgaaatatatgtggctccaaggacttcarataaggaattgtggacttgcatatctattgactgttgggaggaaaactttaagaggtattatgagtgagctataacctcctctttaataagaagagtcag

SEQ ID NO: 16829 - DNA, 201 bp, Homo sapiens
gggtttgtggtatatgatatatacaaaatattacctttataaattctaaaaaaaatctgaattctgaaatatatgtggctccaaggacttcagataaggarttgtggacttgcatatctattgactgttgggaggaaaactttaagaggtattatgagtgagctataacctcctctttaataagaagagtcagtaactgtt

SEQ ID NO: 16830 - DNA, 201 bp, Homo sapiens
ttttaaaaacacggattcctaaattcacatatttgattatgggctcttcttagagattttaaatatttttccagaggtatttttactactcaaaaactttytaaggctgggtgtggtggctcacacctgtaattccagcactttgggaggctgaggcaggcagatcaggagttagaggccaggagttagagatcagcctgg

SEQ ID NO: 16831 - DNA, 201 bp, Homo sapiens
tagaggccaggagttagagatcagcctggccaacacggtgaaacaccatctctattaaaaatacaaaaattagccgggtgtggtggtgcgcacctataatytcagctacttgggagactgagacatgagaattgcttgaacccagcaggcagaggctgcagtgagctaagatcatgccactgcactccagcctgggcgaaa

SEQ ID NO: 16832 - DNA, 201 bp, Homo sapiens
actgagacatgagaattgcttgaacccagcaggcagaggctgcagtgagctaagatcatgccactgcactccagcctgggcgaaagagtgagactctgtcmcaaaaaaaaaaaaaaaaaaaaaaaaaaaaattctaactcctctcttagagcttgccttcaacctgcagtgtatttaaaaatttatgtatataatatgtat

SEQ ID NO: 16833 - DNA, 201 bp, Homo sapiens
gtatttaaaaatttatgtatataatatgtatctatgtgtgtgtgtgtatatatatatgtaatatagatttaagttttgtaactagtaggtgttatttagtsttagtcttatgaatgaggtgggaaatcaagatgagtaatactctatctaaaatgaagtatgactgtagattactgagtctgatttttttcagacttggta

SEQ ID NO: 16834 - DNA, 201 bp, Homo sapiens
atttatttctcatagttctggaagctgagatgtttaagatcaaggtactcattgattctgttcctgatgaggactctcctgccttgtagatggccaccttyctgctgtgtcctcacatgatgaggagggcagtggagggggaagagagagacagagagatgggaggggtggggggagccagccagcatgagagctctctga

SEQ ID NO: 16835 - DNA, 201 bp, Homo sapiens
ctttcaccatgattgtaagcttcctgaggaatgtggaactgtgagtctattaaacttctttcctttataaattacgcggtctcaggtatttcttcatagcrttgtgagaacggactaatacaattactttctccaaatatagccacactggggttcagggtatcaacatatgaatttgggggaggcacagttcagcctatt

SEQ ID NO: 16836 - DNA, 201 bp, Homo sapiens
attgtaagcttcctgaggaatgtggaactgtgagtctattaaacttctttcctttataaattacgcggtctcaggtatttcttcatagcattgtgagaacrgactaatacaattactttctccaaatatagccacactggggttcagggtatcaacatatgaatttgggggaggcacagttcagcctattgtaccctggaa

SEQ ID NO: 16837 - DNA, 201 bp, Homo sapiens
ttctttcctttataaattacgcggtctcaggtatttcttcatagcattgtgagaacggactaatacaattactttctccaaatatagccacactggggttyagggtatcaacatatgaatttgggggaggcacagttcagcctattgtaccctggaacatattatgtgtgttgtaacaatttgtttatgtctgctgccagt

SEQ ID NO: 16838 - DNA, 201 bp, Homo sapiens
gatgtggtggtgcacgcctgtagtcccagctacttgggagtcggaggtgagagaattgcttgaacccaggaggcggaggttgcagtgagctgagattgtgycattgcactccagcctggacgacaaagcgagactgcatctcaaaaaaaaaaaaaaaattttttttggaggctctgagggagaatgtgtttcctgcctttt

SEQ ID NO: 16839 - DNA, 201 bp, Homo sapiens
gcttgaacccaggaggcggaggttgcagtgagctgagattgtgccattgcactccagcctggacgacaaagcgagactgcatctcaaaaaaaaaaaaaaawttttttttggaggctctgagggagaatgtgtttcctgccttttccactttctagaggctgcctgcatttcttggctcatggtcccctttctccatgcatc

SEQ ID NO: 16840 - DNA, 201 bp, Homo sapiens
gcgctgggacagagctgcctgctggagctgccgcagatcgccgtggtgggcggccagagcgccggcaagagctcggtgctcgagaacttcgtgggcaggtragcgcgcagggcgcggagtaaggatgcggcagtggggcgaccccgctgcgggccgttggaacgtggacgggcagcgggagccagagggtggatggaccag

SEQ ID NO: 16841 - DNA, 201 bp, Homo sapiens
ttctattccttacctgtttccatatccccatgtcaataggggagaaaattcagggttggagagacaagtcattcacccaggatcgtatagctagcaagcarccaagctgggattcagtatgactcctcctggaactcttgagaaatatggacacataaaaccaatgaacatgtatttattgagttctaagtttactgggta

SEQ ID NO: 16842 - DNA, 201 bp, Homo sapiens
tacagttctgaaattgaactgaatataagtggaaagtagacaatatatgcatttccagtgtcatctggcagcccatatcattttagctcaagcctgcatgwactgaagtatctatgtcaaagcaggaaggtggtgatctgtgtctcagtttctgagttgacaacaaggcattgaatttagactgtgactttatcacaaaga

SEQ ID NO: 16843 - DNA, 201 bp, Homo sapiens
ggagttgacactaaatgatttgcatttcatgaattaaaaatcatttccaacaaattagagggttcattaataccatattaattactctctctctctctctstgtgtgtgtgtgtgtgtgtgtgtgtgtgtgtgtgtgatcataggtagcttagcttttcttcctttaatagtagcaagactggcatttgatgacattatta

SEQ ID NO: 16844 - DNA, 201 bp, Homo sapiens
aaatagggattgcagacttcaccttttaatctgtgtgtgagttctgagtaagatggtatcaagtgcctggtccatagtatgcattcaataactgattgctsttaatttaaatcttttatttagactggacattttttgagtgttttaaaaacaaaagtaagttgaggcagatggtaatgcgtatttgcaaattctttttgt

SEQ ID NO: 16845 - DNA, 201 bp, Homo sapiens
aaaagctgtcttttaattgaaaaagtgatatgtacatgtaatacaaattcagacattccaaaatacattatatttataccacataaatccctttcccctaytgaggtttcttagtaagatgtttcatttacctgcctatcttccagattacttctgaatttatattttctttatatgaaatttatttgagttttgaggaca

SEQ ID NO: 16846 - DNA, 201 bp, Homo sapiens
tgggattacaggcccccaccagcatgccaggctaatttttttttttttgtggagacggggtttcaccaggctggtctcaaactcctgacctcaggtgattygccagcctccacctcccaaagtgctgggattacaggtgtgagccactgtgcctggcccaatttttccttttttaaaaattattattttaggttcaggggc

SEQ ID NO: 16847 - DNA, 201 bp, Homo sapiens
ttattttaggttcaggggcacatgtgcaggtttgttttataggtaaacttgtgtcatgggggcttgttgtacagattatttcttcacccaggtactaaatygagtacctaatagttattttttctgatactctcccttctcccacccttcaccctcaaggaggccccagtgtctattgtttcctttgtgtttatgaattct

SEQ ID NO: 16848 - DNA, 201 bp, Homo sapiens
aaaatagtttttttctaggtctgtgaggaatgacattggtagtttgataggaataatattgaatctataaattgctttgggcaatatggccattttaatgwtattgattcttcctatccataagcatgggatgtttttccatttgtttgtgtcatctctgatttctttgagcagtattttgtagttctcattgtagagatc

SEQ ID NO: 16849 - DNA, 201 bp, Homo sapiens
tcaaactttgagtagatccctggaggaaggatagtaaaattcatagaagtaaataagtttagagagggaaggaatgcattctctctctacttgcaactggycagatcttccattctaccatcaagctcagggttatccatggaacatcccatttgaacactctgtctatgctgattttgaccttctcagatgtcctgatga

SEQ ID NO: 16850 - DNA, 201 bp, Homo sapiens
gcttccagaactttaataaataaatctcttttatttaagtgacccagcatgtggtattttgttatggtagcctgagcagactaataaaagtacttaacttktattgagtttttgctaattaaattgttgatctgacttagatgggttggtactgagagtgaggatcatgtgtttaagtaagagatttatttttacatttat

SEQ ID NO: 16851 - DNA, 201 bp, Homo sapiens
catgttagagcctgtaaggtatgcaggtggttggatataagagcctggggcacagaggagagtttaactgaagatattaatcagtacttgtcaatatatcrttgatatttaaaaccttaagactgcacaccaaaaactatacaacatcattgaaagaaattaaagaagaccaactaaaatggaaagatatcctatgttcat

SEQ ID NO: 16852 - DNA, 201 bp, Homo sapiens
ttatggagttgcataggattcagaatggccaaaacaatgttgaaagcaaaacaaaacaagttgaaggactcacacttcccagttctaaaacttactacaartcagtgtaatactggtgtaaatatacacatactaaatgaatggaatagacttgagagtccagaaataaactgttacattcgtggtcaattgatttttaac

SEQ ID NO: 16853 - DNA, 201 bp, Homo sapiens
acctggtaactggttaaaagaagctaacagagctcatgataaggcttgccagcctagaggacaaactgccagttgtctatagaacagacaggacttgtggragcatagtgtgttaagtggaggcccctgagcttagaaaaaggggctttcctattaggcaggaaccaagagaagcacaaagagatcatagtttataaatat

SEQ ID NO: 16854 - DNA, 201 bp, Homo sapiens
tttcctattaggcaggaaccaagagaagcacaaagagatcatagtttataaatatgcaacagacacctctgtttggaaggaggcacaacacttattgtggrattgtcattgtgtggcttgcttttttcaataaattccctccttaaaaatttttatatagattgaatatttgtaaatagtgttttattattgatttacatt

SEQ ID NO: 16855 - DNA, 201 bp, Homo sapiens
aaaaccaagaaatggagaatgaaaaattcccaaacctaaatattgacctaataatgggattaaacacatgtaaacaccccattaggggaaaaagtgaaatrtgatcacttagacagttttgttatcttcgaggattaagaaacatttttattcatacatattcctctagaggtgagtaaaaaacaatttctcatattttat

SEQ ID NO: 16856 - DNA, 201 bp, Homo sapiens
ggcataactttaaaagcttttaatgatctggctaccaactacttcccagcataattttccatttcttttgtacatcataggtagccattctctgaaaccgkccttgtactttctctcctttgtgtcatcactcataccattccctccatctagaatgcttttgctccttctattcctcccatttcagttgaatccagcaaa

SEQ ID NO: 16857 - DNA, 201 bp, Homo sapiens
ctcttctaagttagtaccttctggcaactctggcttgttttatcaagcaaggatgagcctctctctatttaaaaacttaatttttgtgtaccctcttacaytgattgagcagttgtggtgtgagaaggaacaaagatgcttctggtgtcctttgtacaatttcttttttttttttgagacggagtctcgctttgtcaccca

SEQ ID NO: 16858 - DNA, 201 bp, Homo sapiens
ttcttttttttttttgagacggagtctcgctttgtcacccaggctggagtgcagtggcgcaatcttggctcactgcaacatctgcctcccgggttcaagcrattctcctgcctcagcctcccaagtagctgggattacaggcatgcgccaccacacccggctaattttgtacttttagtagagacagggtttctccatgtt

SEQ ID NO: 16859 - DNA, 201 bp, Homo sapiens
caggctggagtgcagtggcgcaatcttggctcactgcaacatctgcctcccgggttcaagcgattctcctgcctcagcctcccaagtagctgggattacargcatgcgccaccacacccggctaattttgtacttttagtagagacagggtttctccatgttggtcaggctggtctcgacctcctgacctcaggtgatccg

SEQ ID NO: 16860 - DNA, 201 bp, Homo sapiens
ctctcactctgttctcattaagaaggcattactgaagataaattttaggtgggaccaattacagactaatgcagttatatagtcattgtgatctagctgargaccaggagtcttttaatcagttaaaaacctctgcagcctgggcgacagagtaagactccctccatctcaaaaacaaaaaaacaaacaaaacaaaacaaa

SEQ ID NO: 16861 - DNA, 201 bp, Homo sapiens
aaaaacctctgcagcctgggcgacagagtaagactccctccatctcaaaaacaaaaaaacaaacaaaacaaaacaaaacaaaaacaaacaaacaaacaaamaaaaaccctctgaagtctctcatgcactattctgtgttctgcaaaacgttggccctaattccctgaaataaaaagtgaggaattgatcttcagtaagagt

SEQ ID NO: 16862 - DNA, 201 bp, Homo sapiens
acaaacaaacaaacaaaaaaaaaccctctgaagtctctcatgcactattctgtgttctgcaaaacgttggccctaattccctgaaataaaaagtgaggaaytgatcttcagtaagagtcttttgaatgcttattatgtgcctatcactttgcaaattagattatgtatcaaaaggaggtttagagtagttcttgagctcaa

SEQ ID NO: 16863 - DNA, 201 bp, Homo sapiens
tgctaagcctctaccgactgccagcctccatgcagacgagctatggccattgagctcacagagctagctgataacccatcaggaaaggaatgtgataaggkgtgtagggagaatttgagagatgacaaagcattgtagagggttgagggaagatcagggaaaatgacagagatcatcacatttgagttagtgcttaaagaa

SEQ ID NO: 16864 - DNA, 201 bp, Homo sapiens
gaaatgactctcaaatcctattcattatataggctttgcagtgaattaccaaatggtatattttgagatgaaaaagcttctttgttatctcccaccccaaratagtttttcctttttttttcctttttgcagttctccatcatttgttttttcatatttagatctggtcttcctaaagagtttatgaggatagaaactgtg

SEQ ID NO: 16865 - DNA, 201 bp, Homo sapiens
catgtccaagaagaagaggtgagatttaagcaaggacttgagggaggtgacagcattaattgtgtctcatctcctcagtcaagagttgatgtttcaaatgrcaagataaatgactgtaaaaatgcctgatgttcttaactattagacttaaaccatacgaaaaactgtacgctttttcttttctcgttctccacgaagtaa

SEQ ID NO: 16866 - DNA, 201 bp, Homo sapiens
ccacttataagtgggaacgtgcagtatttggtttgctgttcctgtgttaattcacttaggataatggcctccagctctgtccatgttgctgcaaaggacaygattttgttctttttatggctgcatagtattccatggtgtgtagctatcatgttttctttatccaatttactgttgatgggcacccaggttgattccatg

SEQ ID NO: 16867 - DNA, 201 bp, Homo sapiens
tgttttaagttctttgagaaatatccaaactgctttccacagtggctgaactaatttacattcccaccaacagtgtataagccttccctttcctctgcagkcttgccagcatcttattcagccacttctagagttcattattactttgtctgaattgtttgtaccaaagttacttaaaaagccagtattatttcattgaac

SEQ ID NO: 16868 - DNA, 201 bp, Homo sapiens
ggagtaaaccaaatatttactggcaatagagtgtgccatagcatttgagagcattggaatgagcctgaatacctgggttcaaatctcaccttgccacttaytacctggacaaccttggggaagttaattagccttctaggctttactttcctcatctgcgaaattataaaaatagtagtacctaccttactgcattgtttt

SEQ ID NO: 16869 - DNA, 201 bp, Homo sapiens
aggcgcgtgccaccatgcccagctaatttttgtatttttagtagagacggagttttaccatgttgtccaggatggtctcgatctcttgaccttgtgatcckcccccctcggcctcgcaaagtcctgggattacaggcgtgagccactgcgcctggccaaaaagagttatcttttaaagatacgtacttacatctttattga

SEQ ID NO: 16870 - DNA, 201 bp, Homo sapiens
gttattcgaattttttagtggtagtttgaaataggaatacctgtggctttatattaaaatgtttttgctatttgggggcatttctttttattcttttcaargacttcatttaggaagttaatgttgttccaggcgattagcaaagttacaaatatgtccttctaattctggcatgttgagaatctgaacatgtgaaatact

SEQ ID NO: 16871 - DNA, 201 bp, Homo sapiens
aaaagtgattctgagataatttaaaagtaaagtaaaatttttatttaaaaatataacacatgaaataatttaagaaaaatgaaagagtaggtattaaagayaagacttccaactccccaaaagtaaaattactaacagcttgcagaagctttaatgaaattatttttaacacagattgaaaaaaaccatgtgagatcattt

SEQ ID NO: 16872 - DNA, 201 bp, Homo sapiens
gaaacaaaagtatatgaacaaatggaaataaccagtgggaatgaatgatccatctgattagatcctttgtcattgtgggaaattattacattattccaacytgtagaaatttcctaaaatccccacatggagtcccctatcttttctgtcagagtgtatgtagttatgcaagtgcacttaattttatggaacatcctcatg

SEQ ID NO: 16873 - DNA, 201 bp, Homo sapiens
tgctagtgcatttaattgggattattttttggcacagcgatcattaattagagcaaatggagcataagcaacgttagttgaataaataatgaatttaaagmgtctatgaaggttaaatagcatactctggaatgttctatgaagtaatttttcctttccatgctacatactgtcaagataactagtctaacccaaggttag

SEQ ID NO: 16874 - DNA, 201 bp, Homo sapiens
attttgaaataatttcaaacttgtagaagagttgcaagaagagtattaaaaccctcttgtggccgggcatggtggctcacacctgtaatcccagcactttrggaggccgaggtgggcggatcacctgaggtcaggagttcgagaccagcctcaacatggagaaaccccatctctactaaaaatacaaaattagctgggcgt

SEQ ID NO: 16875 - DNA, 201 bp, Homo sapiens
gttaaacagatgttcagcatggctgcatcttcaaagttttgtctggttccagccctgacgaaacttctagggccctgagagaaagagaaagtttctagttkaagtaatatcctatagtttgttagtggaaacagaagcacgtggtttctgatttggttctggtgttctctttggagatttgtatcagtgatgaaaaaaagg

SEQ ID NO: 16876 - DNA, 201 bp, Homo sapiens
gtgttctctttggagatttgtatcagtgatgaaaaaaaggaaaggttggttaagtctgttgcctcctgaagtggttctttttatcagaataaagactaggyatcatctcctctatgaactttttcctgacactcctgttcatcttccatgctggacccattaggattaatcaccttctcctttgagttacccatatatgtt

SEQ ID NO: 16877 - DNA, 201 bp, Homo sapiens
actcttgacagaaagaatttgcatgaaggtttaggtatgatagcgtcagagaggctaaaactgagaattggccaaagtttttgaaaaggttaaggcaaaamcaaaaacaaaaatgggttaaagacaggagaaagaattttttttgttgtttatctagaagtcggaagagagaaagccattgattagggaagatggaaaagg

SEQ ID NO: 16878 - DNA, 201 bp, Homo sapiens
ttttgcaactaaattgtgctggaaggacccatagtctacctgagagaggaagagcatcaaagtgaaaaggctgcaatgaccaatacagtctcctatataargaaggtgaaggaggcaggtgatgcaaattacggcattagagatggggctgcaggtatagatttggcagtcgtcctatacagtaaacatcacagctttttc

SEQ ID NO: 16879 - DNA, 201 bp, Homo sapiens
gaaggaggcaggtgatgcaaattacggcattagagatggggctgcaggtatagatttggcagtcgtcctatacagtaaacatcacagctttttccaaattwtttttttcaaatgaacgttttctttaagaagagttttagattaatagaaaaaattacatgggcaagtgctaaaaaaaaaaaacagaaaaattacaaagag

SEQ ID NO: 16880 - DNA, 201 bp, Homo sapiens
tgtttttgcatttattaatatcttacattagtatggtatgtttgttgcaattaatgaaccactacttttacaatattattaattaaaatccatattttatycagatttttgttgtttttagcctgcttgcctttttctatccaggatcatatccaggataccacattacatttcatcatcatgtctctaggctcttcttag

SEQ ID NO: 16881 - DNA, 201 bp, Homo sapiens
attgttattgctccctgagacctgtgatgttgaacaattgccactgattatttttgacaaattttttctggggaaagaggcttttcacactgaataagctytgagtcaggtcaagtaaagaaaagccctgtgaatgggggtttttagggaactgctagacaggttaaatagttacaattgtctgaaaattgtatttttgat

SEQ ID NO: 16882 - DNA, 201 bp, Homo sapiens
tgttagacttaaaaaatataaagaagccaaaatatgaaattttacaatactaaatatggtgaaacactgttaaagttacactgtggtttgctctaaacttytagatcaaatattgtgaatgcaggaaaaacaattggtttaggagttcacacttatgttactaaatgaatgcttcttgattacatccacaaagcactcagt

SEQ ID NO: 16883 - DNA, 201 bp, Homo sapiens
attgctttaattaattttaaaagattattctagttgcttgttcatttatttaacaaataatgaatgctcacttactatgtgtcaagtaccattcttatcawcaggaatacagtggtgaagaagacaaaattcttggccttctagagcttgtattctaatgggggaaacagccagataacagaaaacccattagtataatgt

SEQ ID NO: 16884 - DNA, 201 bp, Homo sapiens
ttgctttaattaattttaaaagattattctagttgcttgttcatttatttaacaaataatgaatgctcacttactatgtgtcaagtaccattcttatcatmaggaatacagtggtgaagaagacaaaattcttggccttctagagcttgtattctaatgggggaaacagccagataacagaaaacccattagtataatgtc

SEQ ID NO: 16885 - DNA, 201 bp, Homo sapiens
tgaagaagacaaaattcttggccttctagagcttgtattctaatgggggaaacagccagataacagaaaacccattagtataatgtcaggtgttatgaagraaaataagtgctgcaaagaaaaatgaaacagaatacgggaagagagattgattgggaatgctgtcttagacagacggcctaaggaggcagcatttaagca

SEQ ID NO: 16886 - DNA, 201 bp, Homo sapiens
gagactggatccagttcaagagcagagtttcaagctggagttatgaatcattgagttatcagtctatagtggtatacaggtttaaactgtgctcctcaccyctccaagaaagatatatgtaaagcccaacagtctactctcccccatcccatacctgtgaatatttggaaataaggtctttgcagatgtttttaagttaag

SEQ ID NO: 16887 - DNA, 201 bp, Homo sapiens
atcatcaatgtaaaaggcctcaacgtggatttctaatgcgttcattccttttttgccactgggggtcactgtaaagacgctgcttgaagaagttaaaaatktccctgatgctctttgtggagtttgaatgtagaaatttaatgtagaaaagaaacactgttcatgaaaaagacttaaaaaagtaagaagataataaatata

SEQ ID NO: 16888 - DNA, 201 bp, Homo sapiens
gaagttaccttcaacagaaccacggggtttagacaatgaatttctccagggggattgcgctggacaagtgactacaggccttgcctaattttccttcattrcatcatctttgaggtccttacaccactcaaggggtgagagaagagctcttaggcatatctgatatttagatttcttactgatgtggctgactcttagctt

SEQ ID NO: 16889 - DNA, 201 bp, Homo sapiens
gtttattttctcatattctttaactgtatcttttgaagagcaaattttacttttgattatgcccaatttatcaagtttttatatggctcttttgattatgyccataatcacattagactttgcctaacccaagtttgcagagattttttcttttatgcttttatctagaaattttgtagttttaggttttaaaaaagttta

SEQ ID NO: 16890 - DNA, 201 bp, Homo sapiens
ttttctattttgtaggttgtctctttctctgttgtttcctccggtatgcagaagttttttagtgtgatgtaatttcatttgtctgtttttgcttttgttgmctgtactttcttattcttatccaaaaaatctttatctagatcaatgtcacgaagagtttctcctctgttttcttcgagtagttttttataattttgggta

SEQ ID NO: 16891 - DNA, 201 bp, Homo sapiens
aatatattatattaatatatttatatattaaacctataacatatgcatatacttatttatatataacatgcatgtacttatttatatatacaatatatatwtatatattatataatatattatatgtatttatatattatatatcatatattatatgtatttatatattatatatcatataatatatatatttatattata

SEQ ID NO: 16892 - DNA, 201 bp, Homo sapiens
atattaatatatttatatattaaacctataacatatgcatatacttatttatatataacatgcatgtacttatttatatatacaatatatatttatatatwatataatatattatatgtatttatatattatatatcatatattatatgtatttatatattatatatcatataatatatatatttatattatatatattat

SEQ ID NO: 16893 - DNA, 201 bp, Homo sapiens
aacatatgcatatacttatttatatataacatgcatgtacttatttatatatacaatatatatttatatattatataatatattatatgtatttatatatwatatatcatatattatatgtatttatatattatatatcatataatatatatatttatattatatatattatatgatatataatattatataatgtattaa

SEQ ID NO: 16894 - DNA, 201 bp, Homo sapiens
acatatgcatatacttatttatatataacatgcatgtacttatttatatatacaatatatatttatatattatataatatattatatgtatttatatattwtatatcatatattatatgtatttatatattatatatcatataatatatatatttatattatatatattatatgatatataatattatataatgtattaat

SEQ ID NO: 16895 - DNA, 201 bp, Homo sapiens
tgcatgtacttatttatatatacaatatatatttatatattatataatatattatatgtatttatatattatatatcatatattatatgtatttatatatwatatatcatataatatatatatttatattatatatattatatgatatataatattatataatgtattaatatatattaaacctatatttataattctgga

SEQ ID NO: 16896 - DNA, 201 bp, Homo sapiens
gcatgtacttatttatatatacaatatatatttatatattatataatatattatatgtatttatatattatatatcatatattatatgtatttatatattwtatatcatataatatatatatttatattatatatattatatgatatataatattatataatgtattaatatatattaaacctatatttataattctggac

SEQ ID NO: 16897 - DNA, 201 bp, Homo sapiens
gatttttggaaatggtacacaaaattagttttattgaagagtgaaagagctggacagatgggaaaatcatcatggagactagtagattgtgagggtgaaawccatgagtaggcttaaaagtattgtctcaagacaaaaaaaaaatgggctattttggaagtaaagagtttttaattccaggaggtggccctctactgatgt

SEQ ID NO: 16898 - DNA, 201 bp, Homo sapiens
aaaataaaaactgggttattcagaattgttgaaagtaacaagaaactactactcagggaaaacttagagaaaaaaagacaaaactcttcctattcatcacygtttgctttcagaattaaaatattccataatctttgccagacagaaagtaacaacattgatttcaaatcaccctccctgacaactcccatcaaaacccaa

SEQ ID NO: 16899 - DNA, 201 bp, Homo sapiens
tagtggcatttcattgttgtttgaagttgcaatttcctaatgtaatatgatgttgaacatctttttcataggcttacttgtcatctgtttatcctctttgrtaaggctgttcaggtatttttctcattttttaattgagttgtttcttgttgagttttaagagtatttttgtgtattttggataacagttctttataagat

SEQ ID NO: 16900 - DNA, 201 bp, Homo sapiens
ttgagttttaagagtatttttgtgtattttggataacagttctttataagatgtggggtttcttttgcaattgttttcttctagtctgtgacttgttttcycactttttaatttttttttctgagcagagcttttaagttttaataaagtccccttattgattatttctttcatggatcatgtctttggtgttgtgtctag

SEQ ID NO: 16901 - DNA, 201 bp, Homo sapiens
tccatacaaaacttagaatcagtttgttgatatccacaaaataactgactgggattttgattgagatttcattgaatctatagattaagttgggaagaacyaatatctttgcaatattgagtctttctacttgttaacatgtaaatagctcttcatttatttagttcttctttaatatctttcatcagagttttgtagttt

SEQ ID NO: 16902 - DNA, 201 bp, Homo sapiens
aattgtgtctttcaagaaattggttcattttaaatttatttttaattaattattgaaaaaaaaccatcttaatctgtcacccaggctggagtgcagtgttkcaatcatagctcattgcagcctcaaactcctgggctcaagcaatcctctcacctcagcctcctgggaattggtccattgtatttaggttttcaaatttat

SEQ ID NO: 16903 - DNA, 201 bp, Homo sapiens
tcctctcacctcagcctcctgggaattggtccattgtatttaggttttcaaatttatgggtatacagttgttcataatattctcttattattcttttaccrttcatgagacctgtagtcatgtcctttctttcatatctgacattagtaatttgcatgctctctctttttgattacttagtctggctagaggcttattgat

SEQ ID NO: 16904 - DNA, 201 bp, Homo sapiens
ttgtgaagtaattccactggcaacaaacttccccaatttttctttatttgagaaagtctattactccttcacttttccttccccttccttccctccctccytccttccttccctccctccttccttcgccccctcccttcctccctcccttcctccctcccttcctcctttcttccctcccttctttccttttttcttcct

SEQ ID NO: 16905 - DNA, 201 bp, Homo sapiens
cctttcttttttcttttcttttatttcatgagtactggtgcaccaggatctccttcacttttgaaagataattttgcagggtacagaattctaagttgatrttttatttctcagcactttaaatacttccaccttttcttttgtgcatggtttgtgaggaaaattctgacataattcttatatttgcaatcctttacttct

SEQ ID NO: 16906 - DNA, 201 bp, Homo sapiens
tttacttctttcaagatttttatttttgctttttttttttgtattttaaatatactatgcctagttatagcttttggggggcatttatcccacttgctgtyggagcttcctgaacctgtggtttgatatctgatgttaatttggggggaattctcagtcattatttctttaaatatctgttcctttctctctctcttcttc

SEQ ID NO: 16907 - DNA, 201 bp, Homo sapiens
ggctcacgcctgtaatcccagcactttgggaggctgaggcgggcatatcactaggtcaggagatggagactatactggctaacatggtgaaaccccatctytactaaaaatacaaaaaaaaattagccgggcatggtggcgggcgcctgtagttcccagctactcgggaggctgaggcaggagaatggtgtgaacccggga

SEQ ID NO: 16908 - DNA, 201 bp, Homo sapiens
atctctactaaaaatacaaaaaaaaattagccgggcatggtggcgggcgcctgtagttcccagctactcgggaggctgaggcaggagaatggtgtgaaccygggaggtggagcttgcagtgggccgagatcgcgccactgcactccagcctgggcgacagcgtgagactccgtcaaaaaaaaaaaaaaaaaaaaaaagaac

SEQ ID NO: 16909 - DNA, 201 bp, Homo sapiens
cgggcatggtggcgggcgcctgtagttcccagctactcgggaggctgaggcaggagaatggtgtgaacccgggaggtggagcttgcagtgggccgagatcrcgccactgcactccagcctgggcgacagcgtgagactccgtcaaaaaaaaaaaaaaaaaaaaaaagaacagaatgttgtgggatatttccagttgatcac

SEQ ID NO: 16910 - DNA, 201 bp, Homo sapiens
gggcatggtggcgggcgcctgtagttcccagctactcgggaggctgaggcaggagaatggtgtgaacccgggaggtggagcttgcagtgggccgagatcgygccactgcactccagcctgggcgacagcgtgagactccgtcaaaaaaaaaaaaaaaaaaaaaaagaacagaatgttgtgggatatttccagttgatcact

SEQ ID NO: 16911 - DNA, 201 bp, Homo sapiens
cagctactcgggaggctgaggcaggagaatggtgtgaacccgggaggtggagcttgcagtgggccgagatcgcgccactgcactccagcctgggcgacagygtgagactccgtcaaaaaaaaaaaaaaaaaaaaaaagaacagaatgttgtgggatatttccagttgatcactttcctcctttccctaccagaagcataag

SEQ ID NO: 16912 - DNA, 201 bp, Homo sapiens
ctctgaaggcaaaactcaggtccctgaagctcatccactctgagccttcaagcgattcatggattacagtttaagttttcctgccccagcattgttttccrtggaggtttctgctcttgggtgtctgctctgttgagttgtgattctctatattcacctgtctctccaaattttgggaacagctaattgtctgtgatttca

SEQ ID NO: 16913 - DNA, 201 bp, Homo sapiens
ataaactgtaatgtatgattactgtattgatgcagttgcctactgatgaggaaactaatatttcagagctaataagaggtataggtgggatttgaacccakgcagtctgatccctgagtcagtgcacttatctctatattatgtcacactcacacttttggggtaccttgtgtagcttttcaaagtcttcactaggaccta

SEQ ID NO: 16914 - DNA, 201 bp, Homo sapiens
aaacttttcaagtaagtgatactatttttattttatagatgtggatcatgagatttagagagacgatgtaaaatatagccaagataatacagtctcagtcmgaggtggagctgagatttgaacccaagtctttttggaaacaaaatttgattctcaccacatttcattccagggaaaaaataattccatcctggctctgtt

SEQ ID NO: 16915 - DNA, 201 bp, Homo sapiens
tataccatcctgaaaacttccttcttttcttggttgtattcctgcttcctggatctcatgtcttcctctttattagtttgctcccttgttttgtagaacaygttctttaacagcgttcttaaaaaggtgaaagggaggtaaaatattttgagatttgcaagtctggaaatatcttttcctactgtcacgtttattgaaaat

SEQ ID NO: 16916 - DNA, 201 bp, Homo sapiens
atttagaattctaggttagaaatgatttttccctcagaatttcaaaaacattgctctattgttttttagtttccagtttgctgctaggaagactgatgctrtagtgattcccaatcctttctttgtgtcttttctttaacttctctggaaactttttagtatcttttatcagttcccagtattttgaaatattttactgat

SEQ ID NO: 16917 - DNA, 201 bp, Homo sapiens
ttttccttgtttacttcttttttttttctttcattttctggaacaattccttgagtttttcttccaaccattttactaacattttaatttctgctctcctrttttcagttattgagattttttgcctggtgtttctgtttatggccttctaattttgttccatgaatgcaataagttctcctttctctcagaatattagta

SEQ ID NO: 16918 - DNA, 201 bp, Homo sapiens
ttttggaaacaaaatttgattctcaccacatttcattccagggaaaaaataattccatcctggctctgtttttatttatagccagaaatggaccacctctractgtctccactgctgccattctggtctaggcttccctgatgttttgcctctattactgtaacatctcctaattgttttccctgcttctctctttgatcc

SEQ ID NO: 16919 - DNA, 201 bp, Homo sapiens
caggtggtctagctcagcggatctcacacccacagagctcagcaagctaagatccactggcttgaaattctcactgccagcacagcagtctgaagttgacytgggacgcttgagctttgtttggggaggggcgtctgccattactgaggctggagtaggtggttttcccctcacagtgtaaacaaagccactgggaagttc

SEQ ID NO: 16920 - DNA, 201 bp, Homo sapiens
ttactgtaacatctcctaattgttttccctgcttctctctttgatccccacagttgatttttaatggctaatgcaatcctttaaaaacgtaagtcaggccrggcgcagtggctcatgcttgtaatcccagcactctgggaggctgaggcgggcagatcacctgaggttgggagttcaagatcagcctgaccaacatggaga

SEQ ID NO: 16921 - DNA, 201 bp, Homo sapiens
atatagaaaacaccagaaagatactccttgagaagagcaaccccaagacacataaccgtcagactcaccaaagttgaaatgaaggaaaaaatgttaagggyagccagagagaaagatcgggttacacagaaaagaggcccatcagactaacagcagatctctctacagaaaccctacaagccagaagagagtgggggccaa

SEQ ID NO: 16922 - DNA, 201 bp, Homo sapiens
ggcacctgctaccacgcctggctaattttttgtatttttagtagagacagggtttcaccatgttagccaggatggtctcgatctcctgacctcgtgatccrcccacctcagcctcccaaagtgctgggattacaggtgtgatcaacattcttaaagaaaagaattttcaacccagaaattcatatccagccaaactaagct

SEQ ID NO: 16923 - DNA, 201 bp, Homo sapiens
taattttttgtatttttagtagagacagggtttcaccatgttagccaggatggtctcgatctcctgacctcgtgatccacccacctcagcctcccaaagtsctgggattacaggtgtgatcaacattcttaaagaaaagaattttcaacccagaaattcatatccagccaaactaagcttcataattgaaggagaaataaa

SEQ ID NO: 16924 - DNA, 201 bp, Homo sapiens
accagcctggccaagatggtgaaaccctgttactaaaaaatacaaaaattagctgggcgtggtggcatgcgcacatagtcccagctactcaggaggctcargcaggagaatcgctggaacccgggaggcagaggtggcagtgagctgagattgtgccactgcactacagcctgggtgacagagcaagactctgtctcaaga

SEQ ID NO: 16925 - DNA, 201 bp, Homo sapiens
ataaataagttctttgaaaccaatgagaataaagacacaacgtaccagaatctctggaacacagctaaagcagtgtttatagaggaagttatagcactaamtgcccacaggagaaagcatgaaagatctaaaatcgacaccctaacatcacgattaaaagaactagagaagcaagagcaaacaaattcaaaaactagcgga

SEQ ID NO: 16926 - DNA, 201 bp, Homo sapiens
tcagagaatactataaacacctctatgcaaataaactaggaaatctacaagaaatggaaaaattattagacacatacaccctcccaaaactaaaccaggawgaagttgaatccctgaatagaccaatagcaagtctgaaattgaggcagtaattaatagcctaccaaccaaaaaaaagcccaggaccagatagattcacag

SEQ ID NO: 16927 - DNA, 201 bp, Homo sapiens
ggaagttctggccaggtcaatcaggcaagagaaagaaataaagcgtatttaaataggaagagaggaagtgaaattatccctgtttgcagatgacatgattrtatatttagaaaaccccatcgtctcagcctgaaatctccttaagctgataagcaacttcagcaaagtctcaggatacaaaatcaatgtgcaaaaatcaca

SEQ ID NO: 16928 - DNA, 201 bp, Homo sapiens
aaagaggatacaaataaatggaaaaacattccatgctcctggataggaagaatcaatatcatgaaaatggccatagtgtccaaagtaatttatagattcartgctacctctatcaagctaccactgactttcttcaaagaattagaaaaaactactttaaatttcatatggaaaccaaaaagagcccatgtagccaagaca

SEQ ID NO: 16929 - DNA, 201 bp, Homo sapiens
tcattaaagagtcaagacacaacagatgctggagaggatgtggagaaataggaatgctttgacactgttggtgggagtgtaaattagttcaaccattgcgkaagacagtatgggaatccctcaaggatctagaaccagaaataccatttgatctagcaattccattactgggtatatacccaaagaaatataaattattct

SEQ ID NO: 16930 - DNA, 201 bp, Homo sapiens
aaaatgtataatttccatatatgcgtggtacaaaaataaactcttatatttcaaaattatttttgtgctatagctatttgtttttctcccttgggttgaargttatcttctggatgggtggtttggcaactgtcctcctcatcacactgaaatcaccaaactcaagtagcacttagaaaacaaagtaagacagaaggaaat

SEQ ID NO: 16931 - DNA, 201 bp, Homo sapiens
aactgttgcctcttcgcaggggtaatgtactgtggtctatacaagactttttttttttttttttttttttttttttgttatatggaagagaaatgattggsaagccactaggaggtttggttttaatgccttctcagttgtaaggaatggatttattattagttatacttttctggaatggctgtatgttcccaaatgata

SEQ ID NO: 16932 - DNA, 201 bp, Homo sapiens
aaatcctaattaaataatcattgatttccactcatctaagatgcttttctagataaccccttttcccacaataatttagaattgggccttctgcctacccygctccatgcactatgcacacacttcttccgtaaatcctcaatgctcttacttggttacagatattccttcccctattggagttaagtgttacgacaagca

SEQ ID NO: 16933 - DNA, 201 bp, Homo sapiens
tcattgatttccactcatctaagatgcttttctagataaccccttttcccacaataatttagaattgggccttctgcctaccccgctccatgcactatgcrcacacttcttccgtaaatcctcaatgctcttacttggttacagatattccttcccctattggagttaagtgttacgacaagcatcattgtcattgaatgc

SEQ ID NO: 16934 - DNA, 201 bp, Homo sapiens
acgtctcaggtttccagattcttatgaagtcaccaagatggggaaccctgaagggaagatcaaatacttgattttggacatgttgagcttgagatatcatygacacatccaagaggagaagtcaatcaactggtcaaatatgcatgccacagcaaagataaatcttgtttggagacaacatcttacagctataggtatttg

SEQ ID NO: 16935 - DNA, 201 bp, Homo sapiens
catggtgtatacgctacctgacttcaaactatactacaaggctacagtaaccaaaacagcatggtactggtaccaaaacagagatatagatcaatggaacmgaacagagccctcagaaataacgccgcatatctacaactgtctgatctttgacaaacctgagaaaaacaagcaatggggaaaggattccctatttaataa

SEQ ID NO: 16936 - DNA, 201 bp, Homo sapiens
taaagagcttctgcacagcaaaagaaactagcatcagagtgaacaggcaacctacaaaatgggagaaaattttcgcaacctactcatctgacaaagggctmatatccagaatctacaatgaactcaaacaaatttacaagaaaaaaacaactccatcaaaaagtgggcaaaggacatgaacagacacttctcaaaagaaga

SEQ ID NO: 16937 - DNA, 201 bp, Homo sapiens
tattactgcattttgcatattcatgctcagattaacaaaagtaatatagattaggttgcataaatatgtaattaaataattataagtgcttatattttgtmaatattatttgctaatggtagaactcttatattagaagtggttttttccatccagtggatcaggagatttctatcttttttcccccctaatttccaaatt

SEQ ID NO: 16938 - DNA, 201 bp, Homo sapiens
ttaattgcttcatcctatatttcctcattaaaaatattatacaaaggaaagagttttttttttttcagatataactctttcctaatttattctttcttttygttcttgggttttgttgagctcttgcaaaaactcttcaagttacagagaaagctatttctgtttaggccctaggtcattatcttaatatccaactaaaac

SEQ ID NO: 16939 - DNA, 201 bp, Homo sapiens
cctatctttattgatattagatactgacagtgaagaaaaatattcaataataaaaatttgtgcttcattttaaagtattttaaatgaataataataataawcatataaccctacatagcttattgtacatttgtttattagtatcttaatttcttcgcactgaaaacattaacagatacctctataatattctctaatatg

SEQ ID NO: 16940 - DNA, 201 bp, Homo sapiens
agttggtttttttttttcgtgtttctttctttctttctttcaagcagccagtgtaaggtaattcattctttcctgggacaaatatttattaaatctcccarttatgttgagcagggaaaggtaaagaaaacacacattccttgcccttaggagagtgactaatagacatggcaatgttaatgtactgtgccaaatgctctg

SEQ ID NO: 16941 - DNA, 201 bp, Homo sapiens
ttccctgcctggggtgggtggtatcatccaccatgaggagagacttgggaatgcaggaggatcagcaggtttgggagtgaaagaaattgagaggttgtttyaagtgtgttgagttcaaggcagctaagaggaaataaacatccagtacagttgagcatatgggccactcactcttctgagagttataggctaaagcggaag

SEQ ID NO: 16942 - DNA, 201 bp, Homo sapiens
tcttaatttcttcgcactgaaaacattaacagatacctctataatattctctaatatggtgtattctctaaatttgaaatttcctaatgtaatctttcttraaagtaggagatatatattccaagcttatcttttaccattgtcctcttacatgtaatgctatagccatattaaatgtggcctgtccctccctccttccct

SEQ ID NO: 16943 - DNA, 201 bp, Homo sapiens
gggttgttcaaggcagaagtagcaacctcgggtaaggcactaaagtatgacaggtgaagaacagatgtggctgatgaaggagaggggcatgaagtgaattyagagagggaggaagtgtccagttcacacaaagctttctaggttgaggtaaagtctttatacttaacaatgggaagttacaggagggttttaagcagtaat

SEQ ID NO: 16944 - DNA, 201 bp, Homo sapiens
tgattttagaagaatagtatgcctgctggattgtaaagagccaagagagtgaggagaacagtaggccagaccaggggtggattcattttctgtggagtctraagcttctacaattttacaggcccccttgaagaagaatacaaaattataaacacacaggcccagggtcttggaagaggcttgtgcaagggggaaatgctg

SEQ ID NO: 16945 - DNA, 201 bp, Homo sapiens
atagagagatgggtggctttggggttttggagataaagttgctagggcttcgattgaaatgggggaatggaagaaagggaagttttgagatgacttccaakgttttggctttcacagctgagggagtggtagtgcccatcagatgagggaaatggaggaaaacctctgtttgtatggagaagtgaattaggagttctgttt

SEQ ID NO: 16946 - DNA, 201 bp, Homo sapiens
aagtgaattaggagttctgttttggatgtgctaagcgtaaaatgcccaataggcagttgagtagttttagggaccatgctacttgtctcaaacagagaggygagtgcttatgtcttcgtgtgggaggcaaatgggtaaatagataatttcattaaaaatgtgctaagtaaagtgataaacttcagcaaagggtactatgga

SEQ ID NO: 16947 - DNA, 201 bp, Homo sapiens
tgctacttgtctcaaacagagaggtgagtgcttatgtcttcgtgtgggaggcaaatgggtaaatagataatttcattaaaaatgtgctaagtaaagtgatraacttcagcaaagggtactatggaaacacagcccacagacatgaatcccagctcaagtgtgtaagggagccaggcttctgagctgagtttggaaggatga

SEQ ID NO: 16948 - DNA, 201 bp, Homo sapiens
acagcccacagacatgaatcccagctcaagtgtgtaagggagccaggcttctgagctgagtttggaaggatgagcagctagttaagcaggaagaggtaggytacaggagggggtgatccagacaggagaggaatgagctatgaagccatcagttatgggtagagacctagaacaattcgtcattctagggcataagctgtg

SEQ ID NO: 16949 - DNA, 201 bp, Homo sapiens
agtggccagggacaaaagacagccattgttaatttcaggacatctgtactgctactgcacagcaggtgaaactctcatttatgcattcttctgtgccctcmaatttaccatattcagcaaaagaatgaagaattatacatttcaaatgaatggctagatttatgtccagaaggcatccttatgcatagcactccatatcta

SEQ ID NO: 16950 - DNA, 201 bp, Homo sapiens
gccagacatgctcataattaatcattacttacaccagagaagggacagattaattttgactagtgttgtggagcaagattgggaaagattaatggaggttkttactttcaagtttatcctttcctgtggggaggatggtttcaacaggccaggaggtgttgtgtgtgcatgtgtgcttgcacatgtgggagcgtgcatatg

SEQ ID NO: 16951 - DNA, 201 bp, Homo sapiens
tggaaccaaattacattttttggggtcatacagtatttgaaatcagccaaatacagtatttttacttcacttgtaaaactcattaccatatacagcttttrtcaaatataactgcaaaatctcagtaattcagaattgtcaatttctgatttatatgcctaccaacaggggattgttggtggttattatatgcctgtaaga

SEQ ID NO: 16952 - DNA, 201 bp, Homo sapiens
gagatgctttgtttttcttcattgttttgttaacactgaatgctgactatgagcaagggagggagacagtccttatggagcaaatcaagataaatagggtracaactctccttactgtgtatcctgcaatgtgaaatagaatgctgggcttccaagaaggaaggtctcagcagcaagactggaactataagtgcttgcttt

SEQ ID NO: 16953 - DNA, 201 bp, Homo sapiens
cacacagatgtgtttagccagaggcttctctttaggttgtccatgtctcttactcccaccaattatcctgtcttctttacaagggacagttgtgctgtgtytgttcccaaacccatttagccagttgcgcttattttaataatatactttttaaataaagagagtaattaaactgacccaatgcagaaaagactttgagtt

SEQ ID NO: 16954 - DNA, 201 bp, Homo sapiens
tctttaggttgtccatgtctcttactcccaccaattatcctgtcttctttacaagggacagttgtgctgtgtttgttcccaaacccatttagccagttgcrcttattttaataatatactttttaaataaagagagtaattaaactgacccaatgcagaaaagactttgagttttgtttctatgaaaactaaactgaatgc

SEQ ID NO: 16955 - DNA, 201 bp, Homo sapiens
actagtgctctttccataccacctcttctctcttgactatcacattgcctgcccagatcccatgttgtcatatatttttgtatgtagtttgtgctgtcaargacctcttttcaaaatgcacacactcaaccatagactgttaccgttattggttttgttacttgaaattataattggaacaattagagatgcgtcagtgga

SEQ ID NO: 16956 - DNA, 201 bp, Homo sapiens
aattaaactgacccaatgcagaaaagactttgagttttgtttctatgaaaactaaactgaatgctatgaaaagacttgataactgttagctacaaaagctytgctattgactaggtgtaggcaaggtaatgaaaagaatgtgtgtgtgtgagggattataaaaatctggataggtttggcattcaaattatttcacaagta

SEQ ID NO: 16957 - DNA, 201 bp, Homo sapiens
accatagactgttaccgttattggttttgttacttgaaattataattggaacaattagagatgcgtcagtggaaaggcaatgaaagaaggccattaagtgytaataaatgcctctcctcatgggaacggagatcttttcttctctatgtatttgagctcttttcactggtgcttttaagtggctagaaataacacttgcca

SEQ ID NO: 16958 - DNA, 201 bp, Homo sapiens
ttcttgccttctatccctcaaacttacctgtattcacagccacacccccttcttatccttgtctctgttgagatagtattcctgatcaagggggtgggggrtggtttcctatctgtactctcacctccttagaggatgtactctttttagccttttatttcctgaatcatcatcttctccatcacattttaaaaaatcaac

SEQ ID NO: 16959 - DNA, 201 bp, Homo sapiens
ccagttaattcctcaactgaaatttggattctaccccactactctatagagttaattattgcaaagatcagtgagagtcctgattgccaagcctaaaggaygctcttattcctgagactatattccactctctttataaagctggcactcctctctcatgggttctcttccctctttctctttattccttctctacctcct

SEQ ID NO: 16960 - DNA, 201 bp, Homo sapiens
ataagacaggaacattagagctttatgagctatttggcttcatgccagggacatctcaactttgaaattattttggtgggcatctcttttcagctgctttyctttacctcctcttcaccagtgcatcatcacagggtgctgaaggtcttttcagaaagcactgagaggaacatcttgattttttttttaaccacagtttag

SEQ ID NO: 16961 - DNA, 201 bp, Homo sapiens
tactaaaaatacaaaacttagccaatcatggtggggggtgcctataatctcagctactcaggaggctgaggcaggagaattgctggaacctgggaagcggyggttgcagtgagccgagattgcactattgcactccagcccaggcaacaacagcgagactccatttcccccccgcccccccaaataaagaaaaagaaatac

SEQ ID NO: 16962 - DNA, 201 bp, Homo sapiens
aatgtccctgtctgacagctttgaagagagcagtggttcttccagtacgcagctggagatctgagaacgagcagactgcctcctcaagtgggtccctgacycctgacccccgagcagcctaactgggaggcacccccaagcaggggcacactgacacctcacacggcagggtactccaacagacctgcagctgagggtcct

SEQ ID NO: 16963 - DNA, 201 bp, Homo sapiens
aaaaatttagacgaatgtataactagaataaccaatacagagaagtgcttaaaggagctgatggagctgaaaaccaaggctcgagaactacgtgaagaatkcagaagcctcaggagccgatgtgatcaactggaagaaagggtatcagcaatggaagatgaagtgaatgaaatgaagcgagaagggaagtttagagaaaaa

SEQ ID NO: 16964 - DNA, 201 bp, Homo sapiens
ccagctatcatcataatgacaggatcaaattcacacataacaatattaactttaaatgtaaatggactaaatgctccaattaaaagacacagactggcaarttggataaagagtcaagacccatcagtgtgctgtattcaggaaacccatctcatgtgcagagacacacataggctcaacatgaaaggatggaggaagatc

SEQ ID NO: 16965 - DNA, 201 bp, Homo sapiens
atgactactgggtacataacgaaatgaaggcagaaataaagatgttctttgaaaccaaggaggacaaagacacaacataccagaatctctgggatgcattyaaagcagtgtgtagagggaaatttatagcactaaatgcccacaagagaaagcaggaaagatccaaaattgacaccctaacatcacaattaaaagaactag

SEQ ID NO: 16966 - DNA, 201 bp, Homo sapiens
cattactgggtatgtacccaaaggactataaatcatgctgctataaagacatatgcacatgtatgtttattgcagcactattcacaatagcaaagacttgraaccaacccaaatgtccaacaatgatagactggattaagaaaatgtggcatatatacaccatggaatactatgcagccataaaaaatgatgagttcgtgt

SEQ ID NO: 16967 - DNA, 201 bp, Homo sapiens
gcactattcacaatagcaaagacttggaaccaacccaaatgtccaacaatgatagactggattaagaaaatgtggcatatatacaccatggaatactatgmagccataaaaaatgatgagttcgtgtcctttgtagggacatggatgaaattggaaatcatcattctcagtaaactatctcaagaacaaaaaaccaaacac

SEQ ID NO: 16968 - DNA, 201 bp, Homo sapiens
aacccaaatgtccaacaatgatagactggattaagaaaatgtggcatatatacaccatggaatactatgcagccataaaaaatgatgagttcgtgtccttygtagggacatggatgaaattggaaatcatcattctcagtaaactatctcaagaacaaaaaaccaaacactgcatattctcactcataggtgggaattgaa

SEQ ID NO: 16969 - DNA, 201 bp, Homo sapiens
gaacaaaaaaccaaacactgcatattctcactcataggtgggaattgaacaatgagatcacatggacacaggaaggggaacatcacaccctggggactgtkgtggggtggggggaggggggagggatagcattgggagatatacctaatgctagatgacaagttagtgggtgcagcgcaccagcatggcacatgtatacat

SEQ ID NO: 16970 - DNA, 201 bp, Homo sapiens
cattatgagattaaatgagataatgaaatgagtggtagaaagcctaatcagaaatcaattgaaatgtcagtaggactttattttttaacctctgtatgtaygtatcttaagaattgggactatttatatgtttgggactatttatatatatttatatattttatatttgaaagccagcagttaaaaccaagattttgactc

SEQ ID NO: 16971 - DNA, 201 bp, Homo sapiens
agcctagagccagatatggagccctagggccagaggttctccctaacgtctaatgtcttggcccctcctgggctgagaaaacttaagttcttaagaatcakctgtactcctgaccttaagtaaataagctaactgttttaatttagtgttttcatctataatattcaaatgataataaatcctacttaactctttaggatc

SEQ ID NO: 16972 - DNA, 201 bp, Homo sapiens
gccacgtactaattatatatatgtatatgtgagaataaatcactccctggaaagttaactgttcttggccaggcacggtggctcacgcctgtaatcccagmactttgggaggccaaggtgggtggatcacctgaggtcaggagttcaagaccagcctggccaacatggtgaaatcccatctctacaaaagtacaaaaatta

SEQ ID NO: 16973 - DNA, 201 bp, Homo sapiens
tctctacaaaagtacaaaaattaactgggcatgatggcgggtgcctgtaatcccagctacttgggaggctgaggcgggagaattgtttgaacccaggaggmggaggttgcagtgagctgagattgcaccattgcactccagcctgggcaatagagtgagacttgtctcaaaaaacaacaacaaaaaaaagagttaactgtt

SEQ ID NO: 16974 - DNA, 201 bp, Homo sapiens
cctgttgtctatattaggtatttctcctaatgctatccctcccctagccccccacccccacaacaggccctggtgtgtgatgctcccttccctgtgtccaygtgttctcattgttcaactcccacttatgagtgagaacatgcagtgtttggttttctgtccttgtgatattttgctgagaatgatggtttccagcttcat

SEQ ID NO: 16975 - DNA, 201 bp, Homo sapiens
gatttctattctaactggcgtgagatggtatctcctcattgtggttttgatttgcatttctctaatgaccagtgatgatgagcttttttttcatatgtttrttggctgcataaatgtcttcttttgagaagtgtctgttcatatcctttgcccactttttgattttttttttctggtaaatttgtatacgttctttgtaaa

SEQ ID NO: 16976 - DNA, 201 bp, Homo sapiens
agttttcaaagggaatgcttccagcttttgcccattcagtatgatattggccatgagtgtgtcataaatagctcttattattttgagatacattccatcartacctagtttattgagagtttttagcatgaagggatgttgaattttattgaaggctttttctccatctattgagataatcatgtggtttacgtcattgat

SEQ ID NO: 16977 - DNA, 201 bp, Homo sapiens
tttacgtcattgattctgtttatgtgatggattacatttattgatttgcatatgttgaacctgccttgagtctcagggatgaagccgacttgatcatggtrgagaagctttttgatgtgctgccggattcagtttgccagtattttattgaggattttcacattgatgttcatcaggatattggcctgaaattttcttttt

SEQ ID NO: 16978 - DNA, 201 bp, Homo sapiens
gggatgaagccgacttgatcatggtggagaagctttttgatgtgctgccggattcagtttgccagtattttattgaggattttcacattgatgttcatcargatattggcctgaaattttcttttttgtgtgtgtctctgccaggttttggtattaggatgacgttggcatcataaaatgagttagggaggagttcctctt

SEQ ID NO: 16979 - DNA, 201 bp, Homo sapiens
ctcctgggtagctgggattacaggcacctgccaccacacccagctaattttttgtatttttagtagagatagggtttcatcatattagccaggatgttctytatctcctcaccttgtgatctgcccgccttggcctcccaaagtgctgggattacaggcatgagccactgcacctggctgggtctttgttggtttaaagta

SEQ ID NO: 16980 - DNA, 201 bp, Homo sapiens
atattcttctctaaactggttattctagttagcaatttctctaacattttttcaaggttcttagcttccttgcattgggttagaacatgctcctttagctyggaggagtttgttattacccaccttgtgaagcctacttctgtcaattaatcatactcattctttgtccaattttgttttcttgctggcaaggagttgcga

SEQ ID NO: 16981 - DNA, 201 bp, Homo sapiens
gtatgcttataagttataatgctattctcttcatctgctgctcagatttacttttctagtagatttttaacttatgaatttagagtgcaaaattatgagtmtaataaagaaaagttaaggttacttttcatgctaattgaagtatcctttaaaaaattatatgaaggtaattaatttgtgggcaattactgaatttaatgt

SEQ ID NO: 16982 - DNA, 201 bp, Homo sapiens
aacacctgttttctcacagttgaaatgatacagtgtgcagatttcagttcttgttatttgagcaccatgaaaattctatgggtcttaagatttgttatatmtttttcctgatcctctggaatgcctctattgccgttttactgaaggcagtgcatttcaaccttgccactaaattccagagcaatcttagtctttcccttt

SEQ ID NO: 16983 - DNA, 201 bp, Homo sapiens
acacctgttttctcacagttgaaatgatacagtgtgcagatttcagttcttgttatttgagcaccatgaaaattctatgggtcttaagatttgttatatckttttcctgatcctctggaatgcctctattgccgttttactgaaggcagtgcatttcaaccttgccactaaattccagagcaatcttagtctttcccttta

SEQ ID NO: 16984 - DNA, 201 bp, Homo sapiens
tgcaatgaaggcaataaatttttaatttaattcaatctaattaaagttttaatctggctaccagctactgcattggacggcagagccctacagtatagtgrctccggctgatggctctgggaccttcactgtgggtcctactttattgacagcttagtggtgacctatggtggtagctactgagagaaagagcaaggaagc

SEQ ID NO: 16985 - DNA, 201 bp, Homo sapiens
caaaccccagtctatgattggataattctaccataatagttttactctccacaacttccccatatgcctcatctttctacttcctggctttgctaataccmgtctattctcttggaacgtagtcatttgttttcctttattaaagtttatcttcttttcaagtttgctacaaacagttcagatcatatcatctgaaattat

SEQ ID NO: 16986 - DNA, 201 bp, Homo sapiens
ctttccccatttcttgtttttgtcaggtttgtcaaagatcagatggttgtagatgggtggtgttatttctgaggcctctgttctgttccattgatctatakctctgttttggtaccagtaccatgctgttttggttaccgtagccttgtagtatagtttgaagtcaggtagcgtgatgcctccaactttgttctttttgct

SEQ ID NO: 16987 - DNA, 201 bp, Homo sapiens
ccacatttaaaacagaagcactttgtttttgctttctattacatcctcacatgtttattaatatggattttattttttatttgttatttttgttttgtgtrtgcatatcattacttgtaccagacaaattgtaggcttttgataacaagaactataccttattcatatttttatatgctacggagttcgtgccctatagtt

SEQ ID NO: 16988 - DNA, 201 bp, Homo sapiens
aaagtacagagctattttaatagcaccattgtgttcagggtgtggaactggattcttgacctcagtgcttcttggagcagggggtgggcagtatttgtgtsatttgtctgtctttctcttcctatctcctttcttttgcctgtttccctttccttgtttctttttttgttggatcagtatattgaaatattgtgagatagt

SEQ ID NO: 16989 - DNA, 201 bp, Homo sapiens
tagggagctagcttgcctgaaggctctaaatgggagtgtattgggtgggtttgaaaaagagcagatgccagtgtggctggaactcttcagggaacaaggtraagggtaggaggagatgagtcaaagaggcagtagtgggggttgcttgagtagggccttgtagacccttgtatggactttggtttttaccattaaatggaa

SEQ ID NO: 16990 - DNA, 201 bp, Homo sapiens
tcaagcaatcctcctgcctcaggctcccgagtagctgggactacaggctcaagccaccatgcccagctaatttttacattttttgtagagaagggagtctygtcatgttgctcaggctggtctggaactcctaggctcaagtgatcctcctgccttggcctcccaaagtattaaaattacagatgtaagccactgtgcatg

SEQ ID NO: 16991 - DNA, 201 bp, Homo sapiens
gggattatgaactagaatatattattttccagaatcaaatccaataatgtatacatgatacaatatattttaaaggatcttcagtagttcttcctacttascagaaataaaccataatgacttgaaattttctttatgaatctgagcatatgatgttgattggggtttatatgaaaacagttttgcctattaagaggctca

SEQ ID NO: 16992 - DNA, 201 bp, Homo sapiens
taagaaattataaaagtattaatttggggaactaataaatgaccatgaaatcttcacaatttatgttcttctgccatggcttcagctggtccctccgttcrgggtccctgactttccgcaacaagtggtagaacaaaagctaaagggagagaatgtttcaaggagggaatagtcaatagttagatgtttctaagagctcaa

SEQ ID NO: 16993 - DNA, 201 bp, Homo sapiens
ctgcgtgggaaatagaaaaatatactctgagcttgtgcccaggaaaaaaaaaaagacaaaaaaagatgatgttgactgaaaattgaaaggaaatgggcaarccagggaactggaggttttactaaaatcagaaaaagtttgtgctaggattaaggaaaagaaattatgaggtgggaggttaaagtcagtgagtggcatgtt

SEQ ID NO: 16994 - DNA, 201 bp, Homo sapiens
aatgaacacttcagggatagaatcgagcactatttaatccacagctcaaatagtgtcaccatgaactagttttttttccttccatatttttgttctgctcytttgctgtggttctgttcttgccccaacggactgcaagatgactgtcatcagtctccagggaattgtcttcttactttgaatccagcagaaataagagtc

SEQ ID NO: 16995 - DNA, 201 bp, Homo sapiens
caaggcaggcagaccatttgaggtcaggagtttgagaccagcctgaccaacatggcaaaaccccgtctctactaaaaatacaaaaattggccatatgtggkggcatgcacctgtaatcccacttactcaggaggctgaggcaggagaattgcttgaacccagaagaaggaagttgctgtgagccgacatcgtgccactgta

SEQ ID NO: 16996 - DNA, 201 bp, Homo sapiens
aatctcggctcactgcaagctccgcttcccgggttcacgccattctcctgcctcagcctcccgagtagctgggactacaggcacccgccaccgcgcccggstaattttttgtatttttagtagagacggggtttcaccttgttagccaggatggtctcgatctcctgacctcatgatccacccgcctcggcctcccaaagt

SEQ ID NO: 16997 - DNA, 201 bp, Homo sapiens
actgttaaagttggataggagggtgctcaaattagatgcagggaaattagttgtgagattagtgtagcagtttatatgatagttggtggaagctggagtgrtgatccaaatagacaagagagggtgaatttaagagatattaagatagaatcaacaggacatggtgaccaacttggagcatgaggatagaggtagaaggag

SEQ ID NO: 16998 - DNA, 201 bp, Homo sapiens
tctctgaagagggatggtataaggtgagttctgcatgacaagtcgtggctaaccatgcaaaggtcagaaggtagagtcttgccagaaggtacagcaaggastagaaagaacttgcatgttgtagaaaccaaaagatagccagtgcggctgaaacatgtggcaaagagtggaaagagattaggctgggtgttctaagacact

SEQ ID NO: 16999 - DNA, 201 bp, Homo sapiens
aggcatgcaccaccacacccagttaattttgtatttttagtagagatggggtttatccatattggtgaggctggtctcgaactcctgacttcaggtggtcygcccgcctcagtctcccaaagtgctaggattacaggtgtgagccaccacacctggccagttgttaaatatttttaatattctctcttcagtaaccttaaa

SEQ ID NO: 17000 - DNA, 201 bp, Homo sapiens
agatttgggtggggacatagctaaactatatcactatactatactatcactatactttgagtattagtctgttctttgtgaagtagagagttaaaaagccrtggagaaaagtgcattagcccagactggagagggatgctaaatgggggttataaaagcaacagcacactgaaatggaaattgggcaccaaggcaatgctg

SEQ ID NO: 17001 - DNA, 201 bp, Homo sapiens
gcatttcttttgatccatacaacttgggccatagttagcattatctcagtttagaagtaaaagaaataggttcggagagaattttgcccattcagtggtaragctaatattcaaaggaaggttctgtgtttctcattcgaggactcatctcctgagctcacacagcaagagtgtgctgggcatatggttttcattttgctg

SEQ ID NO: 17002 - DNA, 201 bp, Homo sapiens
atgcttgtggatgagtgaattttttcacattaccaagttgtactttttatatcttataacagcttaagacttcaaccaaaaaagtggggagaattctttcrttaggatttttatgcctaaactgtttcccacagagtgaaatacatgggtggtctgtaggcgagaggtgggggtagatagtatattttggtcttttacaaa

SEQ ID NO: 17003 - DNA, 201 bp, Homo sapiens; identical to SEQ ID NO: 17002

SEQ ID NO: 17004 - DNA, 201 bp, Homo sapiens
taaatctgttgaaatttgccaagtaccgcttgaccaaaggttataagatatcagcccactggcatctacttttctttccctgttgtggctgttttcaattwtatatactcttgaatattctgaatatgtagttctctcactttccctccataggattctgatcaaagctagagtcgcctcaaacaagagcttgattaattg

SEQ ID NO: 17005 - DNA, 201 bp, Homo sapiens
tttccctgttgtggctgttttcaattatatatactcttgaatattctgaatatgtagttctctcactttccctccataggattctgatcaaagctagagtygcctcaaacaagagcttgattaattgcccttctgaagatcaaaatgtgagaaaatttctaggtagcttccaaatttaatttgaccaaccagactaagaaa

SEQ ID NO: 17006 - DNA, 201 bp, Homo sapiens
tcttggcacatttttatgactttggaaattctcaaattgaaaccaggactgaggcttctttctgtgtacctctaaaggggcagggttactagtgtttacarttattttgtgatatccagatatgcgtacttcagctaatattttatagccttaagttttttttgttacaagattagtgcacaagttcaaacaatagagagg

SEQ ID NO: 17007 - DNA, 201 bp, Homo sapiens
ccccattttattgatgataaaattaaagctcagagagcttaaacattatttcatcagagtccacaaatggaaaaactcagtttttttctgtgctcagaagratattgtcaacctacagaaacaacttgttcccctaccgaattcttatagtgcttatatttcctgttgttaaaatgccaattaattatctgctgcgctttc

SEQ ID NO: 17008 - DNA, 201 bp, Homo sapiens
cagcatctccctagcacttcttaatttctcagtgaattttttttgatgaataaataatggtatttcagtcgcattttcaaaagcacatacaaatttgtaayttcactattttctattgtagtcatatacgttgacattctaaatgaactttggtccttgaagtcaatgagaaaagtcattaacttaaggttgttcagtact

SEQ ID NO: 17009 - DNA, 201 bp, Homo sapiens
tttcctctgtcagaacacacagtagcacttgccaaataaattagttgtagtaggagaaatttggcttgattttatctttttgactctccattccaaactakcagtgcagctaaacacttgggttttggagcattctcactgtcctttgcctattttataagctgctgttcattgaaatcccatctgtgttgaagctctgtt

SEQ ID NO: 17010 - DNA, 201 bp, Homo sapiens
aggagtttgcttgggatgactaaggggcaaaaacaattgttaagaagaaagatagtgattttagtatttcagataaatataaatctacacataagtttagrtttatctaaaaatattatatggtctgtttagccaatgctaaaccattggttgttgttaggcagtagagtgcagtgactgagggagagactaaggagctag

SEQ ID NO: 17011 - DNA, 201 bp, Homo sapiens
taaattcatttaatttattgtatttatgaagcacttaggatatacagttgaccctctgaattccatgggtttcacatctgtggattcaaccaattgcagaytgaaaatatttgaaaaaaattgggtctgtactgaacatgtacaggctttcttcttgtcattattccctaaacaatatgatataacaactatttacacagc

SEQ ID NO: 17012 - DNA, 201 bp, Homo sapiens
cagcaggtatttagagtacttactatgtgccatacagtattctaggcactggggatacagcagtaaatttaacagacaaaaatcctgcctgcatgataatmaagtgcaaacaatatagtaaggaaagagaatagaaaatctgggaatggggttgcaatgttaagtagcatggttaagaaaggtggtatttgagattatatt

SEQ ID NO: 17013 - DNA, 201 bp, Homo sapiens
tgattgtctttttaaaatgagatttatccgttggggttgggtaatttggctgtctcgttttctaaaagtgtgattctctaaggcaatattttggataaagwgtatttgccaaggaattaaaagagctttgtctgacatttggttaaatttgttatttgcatactttaaagcattcattcaacaaatatatattagacatgg

SEQ ID NO: 17014 - DNA, 201 bp, Homo sapiens
atgtgtaatttcttgcctaacctctgcttttgattatttatacagttttttctaatgagataatttaaacttagtataatatattgacgtatctgttgctyttgcttgattatcagctttgagattttccttagagaatgcatgatttataagttcaaaaaaacatcattttgggtcaaatcatacacataagggctgctt

SEQ ID NO: 17015 - DNA, 201 bp, Homo sapiens
aatttacttcaatctattttaatctatactgagatcattatgtgagagtattactcttttctttgttttcagggctttgcataaggtgacttgaataatayatgcaaaagatattttgtgaatgaatacttgtgaaatcttttaaatattcctttaatacagaagcatatattcttttcaagacacttacataagccagtt

SEQ ID NO: 17016 - DNA, 201 bp, Homo sapiens
caattaaataggtgattagctttcaaacaaaatacattcttgtgatttcttttctttctcctcttccaattaatgtatatttttaatcatcatcactaaaktacctcacgacataagttttatatatgctgtaatatgaatacatttgccatcatagtgatcacatcatatataggtactacagatatatacaagtttttt

SEQ ID NO: 17017 - DNA, 201 bp, Homo sapiens
atattccagtgaagtcattatgataatgtacatggatttctgtgcaatataaggccctcctcctccttttttttaaatttgaaaatgcttcttttattaaratgggcctatcattgtttggataagcgatacattgaaaggttgggaattaggagaattgctgtggaacttggtttatgaatgtacaggtgataagaattc

SEQ ID NO: 17018 - DNA, 201 bp, Homo sapiens
aatattcccatttagtagataaggaaacaggcttgggatgtcagatatcttgcctcatgtctcatggctaataaatggagaagctgctatgtgaacacagwtgtgctagacttaagcatttaacaacaaagcaggagggtaaagatgcacggggcccactctggagtcaggtcaccacttactagctgtgaaacttgggtt

SEQ ID NO: 17019 - DNA, 201 bp, Homo sapiens
agaatgatgggaaacaaccctctgggatgtaacagggaaagggtagagagccccctaaagaactgaaactccatcttctcagtaagtagttaacaacttgrgtgctgctgcctagtgaggaagcccaagttcttcataggtgtgtctccaggccttcacttattcatttttgttacatctgcaaatacagtagtcccccct

SEQ ID NO: 17020 - DNA, 201 bp, Homo sapiens
aacaacttgggtgctgctgcctagtgaggaagcccaagttcttcataggtgtgtctccaggccttcacttattcatttttgttacatctgcaaatacagtwgtcccccctaattcacagggactacattccaagactccgcatagatgcctaaaaccacagatagtactgaatcctatgcatactatgctttttttccatc

SEQ ID NO: 17021 - DNA, 201 bp, Homo sapiens
ctcatttccagtttttccaaacttggcatttttaaccattgttggccttttaacctcttttagtaattctatctatcatttgtgctatgcacataaaaagwtagtaagctaccattacaggtggtgaatagctctggaaggggtttgagcaaggaaacaattttatgaggcttgtattttagagagattattctggtagag

SEQ ID NO: 17022 - DNA, 201 bp, Homo sapiens
ctcaaactcctgacatcaagcaatcctcccactataacctcccaaagcactgggattataggctcaaaagagagcttgaagtccccaaatgaatcagggaraagtctaatttcaaggaatgatttcagggtaaatttaaaaaggaaagaaaattatggttagatttacttctcattaaaagtattgaagtttagggttaat

SEQ ID NO: 17023 - DNA, 201 bp, Homo sapiens
tatattttaatgataggtagaaattggacaggtccagctaaaaggatgaaagtttgctcaagagtgggaaaagttagaaggtagattttgtggtagacatkctccagtggtctctatacacattctttataatcccctctcatgttgtttcaggattggtctgtgtaactgtggtaggctaagtaatccctccaaccctcc

SEQ ID NO: 17024 - DNA, 201 bp, Homo sapiens
atattttaatgataggtagaaattggacaggtccagctaaaaggatgaaagtttgctcaagagtgggaaaagttagaaggtagattttgtggtagacatgytccagtggtctctatacacattctttataatcccctctcatgttgtttcaggattggtctgtgtaactgtggtaggctaagtaatccctccaaccctccc

SEQ ID NO: 17025 - DNA, 201 bp, Homo sapiens
aaaaagacatggtatatttagggtttgttacaattcaaggttttggacatccactgtggatcttggaatgtatcccctacacataaggggaagtgggggcrctactgtactttctaaaaccaagttggataattgaaaatgttgagaaagaagtttaggataaaggacttcattacctgccttgtgggggcttagaaatgt

SEQ ID NO: 17026 - DNA, 201 bp, Homo sapiens
tcatctatcataaattgcaaatatttttaatagcttgttaaagatacagtttacataccatacaacttgaccaatagaagttaacagttgaatagattttrgtcttttcacagatatgtgcaaccatctccacaatcagctttagaactgtttgatcactcccaaaagaaagcctgtatgtttctgctgtcacctcttttc

SEQ ID NO: 17027 - DNA, 201 bp, Homo sapiens
ctctgttatgtatatgtatgaaaatttgccctacctattaccttactttggcatgtggcatttacttgtgaaaaatgtcacaatatctaatagtttatttyctactcatggatataaggcaaaataacattaaacaagaataaatatctgtttaccaacatttaaatgatagttcttttgttgtcaactggcaagtacgga

SEQ ID NO: 17028 - DNA, 201 bp, Homo sapiens
tggcttactgcagcctccacctcctgggcccaagcaatgctcccacctcagcctcctgagtagctaggactacagggttgcaccaccatgcccagctaatwtttttttttttttttttttttttttttttgtagaaacagggtttcaccaggctgattttgaactcctgggctcaagtgttccttctgccttagcctccca

SEQ ID NO: 17029 - DNA, 201 bp, Homo sapiens
ttctgggatgtgtaagcccaggaatgggaaaggaggaaaaatcatcttagagtttattaagtacggaatctgacccatggacttgatatgtgcattctcaytgcagacttgggtttggggttttacaaatgtagaatccaaatattagagaagttcatcgctttcctgtcaccctcttaagggaatgaactgtgtagctga

SEQ ID NO: 17030 - DNA, 201 bp, Homo sapiens
agtcatattatgaacagttgttatattttacattgttttataattggtctcctgcatgataaaactcatttgcaaggcagaaaggcaaaaatgtgagaagyaagaaaccaatttattgttaatcaataattacaataaaaatgggaataaggagaaatgtgattttaactcacttcctgggaagacattccagagtttggg

SEQ ID NO: 17031 - DNA, 201 bp, Homo sapiens
aaactgacaaatttatttgctttccagaaattttgtttctttattttgtgtatttatacactttgaaaatccatcaatttgtcttggcaattctgatattwctcctatttcacaagtaatgaaactgaggccaggatggctaaatgacatctcaggtagcagaactattaggagttagactaacgtctccagatttctttt

SEQ ID NO: 17032 - DNA, 201 bp, Homo sapiens
tactgaattgtaacagatatatattaaatacaagtcccatatcagatatttgatttgcattttttttttctattttataggcccttttcattttcttggcrgtgtcctttgaagcacaagattttttattttggtgaagtccaatttatctacttttttctttcatttctcgttatttttgtatatatctaagaatccttt

SEQ ID NO: 17033 - DNA, 201 bp, Homo sapiens
cacatttctttttttttttttttttcactttaagttctagggtacatgtgcacaacgtgcagtttgttacatatgtatacatgtcccatgttggtgtgctrtacccattgactcatcatttaaattaggtatatctcctaatgctatccctcccttttccctgcacccccaccggcaggccccagtgtgtgatgttcccca

SEQ ID NO: 17034 - DNA, 201 bp, Homo sapiens
atgttccccaccctgtgtccatgtgttctcattgttcaattcccacctatgattgagaacatgcggtgtttggttttctgtccttgcgatagtttgctcaraatgatggtatccagctccatccatgtccctataaaggacatgaactcatccttttttatggctgcatagtattccatggtgtatatgtgacacattttc

SEQ ID NO: 17035 - DNA, 201 bp, Homo sapiens
gggggtggataagctttttgatttgctgctggatttggtttgccagtatttcattgatgatttttgcatcgatgttcatcagggatattggtctaaaattmtcttattttgttgtgtccctgccaggctttggtattaggatgatgttggcctcataaaatgcattagggaggattccctctttttctattgattggaata

SEQ ID NO: 17036 - DNA, 201 bp, Homo sapiens
cattagggaggattccctctttttctattgattggaatagtttcagaaggaatggaaccagctcctctttctacctctggtagaatttggctgtgaatccrtctggtcctggactttttatggttggtaggctattaattattgcctcaatttcagaacttgttattggtctattcagggattcagcttcctcctggttta

SEQ ID NO: 17037 - DNA, 201 bp, Homo sapiens
agctcctctttctacctctggtagaatttggctgtgaatccatctggtcctggactttttatggttggtaggctattaattattgcctcaatttcagaacytgttattggtctattcagggattcagcttcctcctggtttagtcttgggagggtgtatgtgtcgaggaatttatccatttcctctagattttctagttta

SEQ ID NO: 17038 - DNA, 201 bp, Homo sapiens
ggtttagtcttgggagggtgtatgtgtcgaggaatttatccatttcctctagattttctagtttatttgcgtagaggtgtttatggtattatctgatggtrgtttgtatttctatgggattgctggtgatatcccctttatcattttttgttgcatctatttgattcttctctcttttcttctttattagtcttgctagcg

SEQ ID NO: 17039 - DNA, 201 bp, Homo sapiens
attgatctgtctaatgttgacagtggggtgttaaagtctcccattattatatgtgggagtctaagtctctttttaggtctctaaggacttgctttatgaawctgggtgctcctgtattgggtgcatatatatttaggatagttagctcttcttgttgaattgatccctgtaccattaggtaatgaccttctttgtctcttt

SEQ ID NO: 17040 - DNA, 201 bp, Homo sapiens
gatattgaatgggagttgtgagaggggacatccttgccctcttcctcatctcatggtacagcatctagtgtctcaccattaagtatgatgttagctctatrgtttttttgtagatgttcattatcaagttgaagaagttcccttctattcttagtttgctgtgagtttttatcatgatggttgttgtcaaatgcttttctt

SEQ ID NO: 17041 - DNA, 201 bp, Homo sapiens
tagccttgtaatatagtttgaagttgagtaacatgatgcctccagctttgttctttttgcttaggattgccttggctactcagggtcttttttggttccayatgaattttaaaatagttttttctagttctgtgaagaatgtcattggtagtttgataggaatagcattgaatctgtaaattgctttgggcagtataacca

SEQ ID NO: 17042 - DNA, 201 bp, Homo sapiens
gttaatttgagatcattccaactttttgatgtaggcattaagtgctatgaatttccctcttaacgcaggcttggctgtgtcccagagattctggtgtgttktatctgtgttctcattattttcaaagaacttcttgatttctgccttagttttattatttacccaaaagtcattcaggagtatgttgtttaatttccatgt

SEQ ID NO: 17043 - DNA, 201 bp, Homo sapiens
tttcttatctgaaaattatcttgttcctccttcacttacgaagcttagtttggctgtatatgaaattcttggttgaagattttttctttaagaatgttgartataggcccccaatctcttctggcttatagggtttcagctgggaggttcactgttatcctgatgatgttttctttgtaggtgacctgccctgtctctcta

SEQ ID NO: 17044 - DNA, 201 bp, Homo sapiens
aattacctccacctggtctctcccttgacatgtggggattgtgaagattatggggattacaattcaagatgagatttgggtggggacacaaagcctaaacrtatcaatagccattctgactggtatgagatgatatcttattgtagttttgatccgtatttctctgatgattaatgatgttgagcattgttttcttatgtt

SEQ ID NO: 17045 - DNA, 201 bp, Homo sapiens
ctggtatgagatgatatcttattgtagttttgatccgtatttctctgatgattaatgatgttgagcattgttttcttatgtttgttggctgcttttatgtwttcttttgagaattgtctgttcctgtcctttgcccacttttttttttccccctttttgagatggagtctcgctcttcttgcctaggctggagtgcagtgg

SEQ ID NO: 17046 - DNA, 201 bp, Homo sapiens
tagcctcataggatgagttaggaagtgttccttctgtttttatttaaaagagtttgtaaagaattggtataatttcttctctaaatgtttggtgcaattcwtctgtgaaaccatctaggcctggtgctttattttttgaagattattagttattgaatcaatttatgtaatagatctaggcctattgagattatctatttc

SEQ ID NO: 17047 - DNA, 201 bp, Homo sapiens
attgaatcaatttatgtaatagatctaggcctattgagattatctatttctctttatgtgagttttactagattatgtctttcaaggaattggttaatcaygctttcaaatatcctacttattacccatatatacttttgatatgatatatttcacacttcattactttatatatgtatttcttttactaaattgtggggt

SEQ ID NO: 17048 - DNA, 201 bp, Homo sapiens
gtttgtaatgattatggtaaacaaccagatttccttgtgaagtagactcatgttatttctcagaatttatcacattatttatctgtatttcttccctgtartctgtgaagttagcttttgtataatagggtgtgtgtatttatttacaagaaaattactctatgtgttaaaataatgtttagccttgttttcttcttatta

SEQ ID NO: 17049 - DNA, 201 bp, Homo sapiens
ttgatggttaaattggttatttatgttgtgtataaggtttgcaaggctacttaaccagcttgattcttcatttccatcactataaagtggataaaactgtmtgccacatttttaaaggtgaaaagattattgatatttttatgtaaaatggctggtaccaagggtgtcattgctattaaacatatacttctgcaggcagag

SEQ ID NO: 17050 - DNA, 201 bp, Homo sapiens
tttttaaattctttttattttatttttatttttgagacagagtcttgctctgtcacccaggctggagtgcagtggtgcgatctcagctcactgcaagctcygcctcttgggttcatgccattctcctgcctcagcctcccgagtagctgggattgcaggtacccaccaccacacctggctaatttttttttgtatttttag

SEQ ID NO: 17051 - DNA, 201 bp, Homo sapiens
tactattttttgaatgagacagaacaagcacaaagatgtttatataaacccaagtgagaattttgactgatagtatctcaactacaaattgcagtttttcygcaagatttagaagagaggagaccacaagtagtagaagacagaaaacagacacagcagaacttttggctttgctctttaaatgtaaggatctacttctaa

SEQ ID NO: 17052 - DNA, 201 bp, Homo sapiens
taaagttcttatagattctggatattagtcctttattggatgcatagtttgcaaaaattttctctcatcctgtagatcgtctgtttactctgttggtagtytcttttgcagtgcataatgtctttagtttagttaagtcccgtttgtctatttctgtttttgttgcattgcttttggggtcttagtgagaagtccttttcc

SEQ ID NO: 17053 - DNA, 201 bp, Homo sapiens
tcttatagattctggatattagtcctttattggatgcatagtttgcaaaaattttctctcatcctgtagatcgtctgtttactctgttggtagtttctttkgcagtgcataatgtctttagtttagttaagtcccgtttgtctatttctgtttttgttgcattgcttttggggtcttagtgagaagtccttttcctaggct

SEQ ID NO: 17054 - DNA, 201 bp, Homo sapiens
aagacgtgttggttgaaaatatgtggctttacttctgagttctctgttcttttacattgatctatgtgtctattttcatacaagtaccatgctgttttggktactatagccttgtatagtttagtatagagtagtttgaagttgggtaatgtgatgcctctggctttgttctttttgcttaggattgctttggctatttgg

SEQ ID NO: 17055 - DNA, 201 bp, Homo sapiens
tagtgattacactgcccattaaccagtgagtattgatctatttattcctgaaaattttccctccccatttaaaaataagcagaaataaaaacctggcttcrtcatttgtgatggatgctaaagtcatgactagataaaagacttcaatttatcagtttatgtctgaagccgaaaactacttgttgatctcttaaattcaaa

SEQ ID NO: 17056 - DNA, 201 bp, Homo sapiens
ctttctgagcttgggcacttccactaactcttattttgctgctggtccctgtccctttgaggagcaacagcactaaaaagctactttcagagatccaaaamcaacatggttcgtggaaagccatgtattggtatggctggggcctgccaaccaattgtgttcagtcctttactctcagagatatttaaaatctcctactgg

SEQ ID NO: 17057 - DNA, 201 bp, Homo sapiens
tgtttttcctgaagggtgacagtagagggtgggaaaggtacattttacataggagatttatatcttaattttactctcaaaatagaagaccctgagaaaawacacatgagcagggaattttttaaaagaaattcagtttaaagtcagctttttctagattgcaagtaagctgtgtagagtaagggaaacatggctcatctg

SEQ ID NO: 17058 - DNA, 201 bp, Homo sapiens
ctatgttagcaagatttcaggatacactatcaatacacaacaatcagttgtattttttaaacttttattttaggtttgggggtgcatgtgaaggtttgtcrcataaataaacccatgtcatgggggtttgtggtacagattatttcatcatccaggttttaagtccagtaagcccagtgctcaagttatcttttctgctcc

SEQ ID NO: 17059 - DNA, 201 bp, Homo sapiens
cattctggctggggtaaggtggtatctcattgtggttttaatttgcacttccttgatgattagtgatgttgaacattttttcatgttttttggccatttgyatatcttcttttgagaaatgaagatagatatattttgaattttgatgttttcacatccacccctcctccaaaaggctgtgccagttaatattccagccaa

SEQ ID NO: 17060 - DNA, 201 bp, Homo sapiens
attatggctattaacttttattcatatatattgccaatacttttctcaatttatcatctgtttttcaattttgttcattattttgccatgaagaagtgtgycattgctatgagtcttttatagtttcaggttttatgccaaatgtcttttttttttcttttaacttcaatcttcccaaattgtcatctattttgtactctg

SEQ ID NO: 17061 - DNA, 201 bp, Homo sapiens
tattcatatatattgccaatacttttctcaatttatcatctgtttttcaattttgttcattattttgccatgaagaagtgtgtcattgctatgagtctttyatagtttcaggttttatgccaaatgtcttttttttttcttttaacttcaatcttcccaaattgtcatctattttgtactctggggctttgagatttgacc

SEQ ID NO: 17062 - DNA, 201 bp, Homo sapiens
atgagaagccagttgtcctaaaattatttgttcagaagtctggtttgtaatgccgcctttatcataaactaacttctcaggtcggtttcactctttcttcrctctcttctattcacctgacctgccagtggacttttaccacaggcttctgttgtctaatttttatattaaatttaaatcttaatatttgaagggcatttt

SEQ ID NO: 17063 - DNA, 201 bp, Homo sapiens
aatgtattcatataagactgcacattttctggtaggtttatgaccagatgttttttagtagataccctacgttcatttaatggttgatttggagtgcagtmccacaagttgagtctaaagtgtgaaaataaattttttaaaatttttatcaatcattgtcaccaaagacctcttcttttgccactttctactatgaaacac

SEQ ID NO: 17064 - DNA, 201 bp, Homo sapiens
gtggctcaatgcaagctgtacctcagaatcctgtcatttctaaataacatcttatctatatgctatttccatgaaaagctagtttggccaagattttgctrtaaagtatccaacgagttaggctttcattatttttctggtcttacttaatgaagaaacacatctgggaaatcaatgagtatttgaactcactgggcttca

SEQ ID NO: 17065 - DNA, 201 bp, Homo sapiens
agtcctgagagacctacaaagagaattagactcccatacaataataatgggagactttaacaccccactgtcaacataagacagatcaacgagacagaaakttaacaaggatatccaggaactgaactccgctctgcaccaagcagacctaatagacatctacaggactctccaccccaaatcaacagaatatacattctt

SEQ ID NO: 17066 - DNA, 201 bp, Homo sapiens
agaggtacaaggaggaactgataccattccttctgaaactattccaatcaatagaaaaagagggaatcctccctaactcattttatgagtccagcatcatyctgataccaaagcctggcagagacacaacaaaaaaagagaattttagaccaatatccctgatgaacatcgatgcaaaaatcctcaataaaatactggcaa

SEQ ID NO: 17067 - DNA, 201 bp, Homo sapiens
gcaaatcaataaatgtaatccagcatataaacagaaccaacgacaaaaaccacatgattatctcaatagatgcagaaaaggcctttgacaaaattcaacarcccttcacgctaaaaactctcaataaattaggtattgatgggacgtatctcaaaataataagagctatttatgataaacccacagtcaatatcatactga

SEQ ID NO: 17068 - DNA, 201 bp, Homo sapiens
aaatcaataaatgtaatccagcatataaacagaaccaacgacaaaaaccacatgattatctcaatagatgcagaaaaggcctttgacaaaattcaacagcscttcacgctaaaaactctcaataaattaggtattgatgggacgtatctcaaaataataagagctatttatgataaacccacagtcaatatcatactgaat

SEQ ID NO: 17069 - DNA, 201 bp, Homo sapiens
attcaattaggaaaagaggaagtcaaattgtccctgtttgcagatgacatgattgtatatctagaaaacctcattgtctcagcccaaaatctccttaagckgataagcaacttcagcaaagtctcaggatataaaatcaatgtgcaaaaatcacaagcattcttacacaccaataacagacagagagccaaatcacgagtg

SEQ ID NO: 17070 - DNA, 201 bp, Homo sapiens
ctcattgtctcagcccaaaatctccttaagctgataagcaacttcagcaaagtctcaggatataaaatcaatgtgcaaaaatcacaagcattcttacacamcaataacagacagagagccaaatcacgagtgaactcccattcacaattgcttcaaagagaataaaatacctaggaatccaacttacaaaagatgtgaagg

SEQ ID NO: 17071 - DNA, 201 bp, Homo sapiens
aagtacataactgatgtattgatgtctgcctctgccctttttttcattaccatactataaatacattactaccacttggtgcaaacacaagcactaaaatygaatggtggtgtccaattataaagtcatgccccagacagttcagcaaatctcttttactaatttttattagataccaacacaagatttctttttaattct

SEQ ID NO: 17072 - DNA, 201 bp, Homo sapiens
gggttgggcagctttaatttctctctaatgataccttctcagttcattctctgggttcttggttatctctctcccctccgcttcttcttttctccagcccygtccttttttttccttttttttttttttttttttttttgtagtgggcaggctaggaggcatgattaggattgatggaggaggggaactattccagttcat

SEQ ID NO: 17073 - DNA, 201 bp, Homo sapiens
ttctctctaatgataccttctcagttcattctctgggttcttggttatctctctcccctccgcttcttcttttctccagccctgtccttttttttcctttyttttttttttttttttttttgtagtgggcaggctaggaggcatgattaggattgatggaggaggggaactattccagttcatttattttttccctgtcca

SEQ ID NO: 17074 - DNA, 201 bp, Homo sapiens
cggcatggagatgtgttggagccagtagtggtgcacagaccaccagctgtgcttgcagtgatccagccaaatatcatcttaaatacagggctgagtctcaraaggcacatggaaggggcccccttttccctattctatcccagactcctgtactccttggaacacagggagaagggctcttaactaaagtacaaagggcat

SEQ ID NO: 17075 - DNA, 201 bp, Homo sapiens
gtaaacaaggtacttttattaagttgaacttttacaaacatatggtatatttagccaaaataacactgttatttaaggcaagtacatccaaagggctagcrtgtagaattatgtttgattaatgtgcactcaaaagctgttacacagtaagcataatttcagtttgtggagtgtcttaaatttactttgtaatttaatgtg

SEQ ID NO: 17076 - DNA, 201 bp, Homo sapiens
gatctcattgttcaattcccacctatgagtgagaatatgcggtgtttggttttttgttcttgtgatagtttactgagaatgatgatttccaatttcatccrtgtccctacaaaggacatgaactcatcattttttatggctgcatagtattccatggtgtatatgtgccacattttcttaatccagtctatcgttgttgga

SEQ ID NO: 17077 - DNA, 201 bp, Homo sapiens
ccaagtctttgctatcgtgaataatgccgcaataaacatacgtgtgcatgtgacaaaattgacaaatgggatctaattaaactaaagagcttctgcacagmaaaagaaactagcatcagagtgaacaggcaacctacaaaatgggagaaaattttcgcaacctactcatctgacaaagggctaatatccagaatctacaat

SEQ ID NO: 17078 - DNA, 201 bp, Homo sapiens
ataaacaccagattttagttttcaacagcatgtggaaatattattctggtattctcaatatttgcatagcctctcattattctttgatactttgattattktatgagtcagtcatcatctctgagtccttgaactaggcaaagcactataccagcccaggagggggctgttcatatgttcattcagcaagtgtttgctgaa

SEQ ID NO: 17079 - DNA, 201 bp, Homo sapiens
caaaactaataaggaaataatttatttcctcaaagagttgatggtttggtagcaaagtcagcacacaactacagagtaacaggggagcaagacacatagartgattaacaacgataataaataaaggtaataatagtaatggagttgcttgtttctttaggggtttatcttgtagttggaaaggcagagcatagacacact

SEQ ID NO: 17080 - DNA, 201 bp, Homo sapiens
tgaagacagagggcagaccataaggttccagccagacggaggtcagggcagagtcctgccactgtgggaacacttggaggataaggctgccaggtggaccrgctagggaacaaggatctggaaatttaggcctgtgttctagtcatccacaggtgtattagtccattctcacactgctataaagaactacctgagactgga

SEQ ID NO: 17081 - DNA, 201 bp, Homo sapiens
acgttctgtgtggaaaatgaaaatgcatggactttcctgggaagcaggaatcccatggctggtgcagtgggtacagtgaagagtttgaatttactctggcrggcaatccagtgtctcagaaaatgaggtgtgggtgaggagcatgatgaatatgtatggttacataactctgtgtcagttactcagagcatgaagggcttg

SEQ ID NO: 17082 - DNA, 201 bp, Homo sapiens
ttggtgccattagcggctttttcgtatgttaatatttctctttattactctattattatttcttatttatttatttatttatttatttatttatttatttrtttgtttattttgagacagtttcgctcttgtcacccaggctggagtgcaatggcgtgatctcggctcactgcaacttctgcctcctgggttcaagtgatt

SEQ ID NO: 17083 - DNA, 201 bp, Homo sapiens
attcttattcttattctaatataatctcttttaagttctaccatttttgaaaacttttcatcagttcatatctcctaggagcagaatctatgctttttttkgtatgcttttgaagtatattggattaccacagtacatttatgtgttaaaggtttgtatgaatcaaatcagagatattggtttaggttagtaaaacttcat

SEQ ID NO: 17084 - DNA, 201 bp, Homo sapiens
tttacttgattatcatatatatgtgactatcaaacatcttaatcaacacctggctttggttgtcagacattttcaaatcaattcaataatatttataatayacactgtaagaatttttatgcctagcatcatgctaggcattatatagaaacaaggaaggactcatagtcttacctttgaagatgttgttgctttaataga

SEQ ID NO: 17085 - DNA, 201 bp, Homo sapiens
ggataaacctgatagcagaaacagggaggtcagaaggaaaaactgtttggatggatgagaggaaggaaagagttaagtacatggggtatttagtgctatcrgtagaaatttaatggaactacatatgtcatttaaaattgtctgacagccaacttcaaaacagtaagaaaaaacaggtgaaattatgtttaataatgcttt

SEQ ID NO: 17086 - DNA, 201 bp, Homo sapiens
attgcctttgagatcaaaaggatacagttacaaataagaaagcgtaggctcagggatgctaactcactttcttaaggtcataaaactggtgcatgggggarctggaacttgtattaggacttcctctaagtacacttttccttccactcattttccattgtgtgcttattttgttctgctgttcatgtgcagtatcaaaac

SEQ ID NO: 17087 - DNA, 201 bp, Homo sapiens
tctttgactgaatacccagtaacgaagtagttctagttttagtatttttagaaattgccatactgttttccataatagctgtgctgatttacattcccacyaagagtgtatgttcccttttctccacatcctcaccgccatcaacagattaaatctcattactcattattggttggttcaggttttttatttctttctgat

SEQ ID NO: 17088 - DNA, 201 bp, Homo sapiens
gtctaatatgcagtttaaatccaatgtttcttcgttaattttcagtctagatgatctgtcttatgcttagagtggagtgtagaagtcccaactattcctgyattagagtctttcccttcaggtctaataatatttgctttatatatctgggtgctctggtgttgggagcacacatgaggatacaatcattacaatcattat

SEQ ID NO: 17089 - DNA, 201 bp, Homo sapiens
catgtgttttcataatggtagttattattcttttgcttttgggtgtaggtctcccttaagtatttcttataggggtggtctagtggtgctgtatctcttascttttgctcatctgtgaaagacattatatctctttcatttaggaaggataattttgctgggcataatatttttggctagcacattttttcttttggcact

SEQ ID NO: 17090 - DNA, 201 bp, Homo sapiens
tgagattctttctcctgcttgttctgtcttactgttgaaggttttgaatgtattttgtatattattcaatgaattcgtcagttccaaaatttctgcttttwaaaaaattatatctctttgataaatttctcattcatatcctgaattgtttttctgatttctttgtatcgtttttcagaatcttctttttttcacccattt

SEQ ID NO: 17091 - DNA, 201 bp, Homo sapiens
atgaattcgtcagttccaaaatttctgctttttaaaaaattatatctctttgataaatttctcattcatatcctgaattgtttttctgatttctttgtatygtttttcagaatcttctttttttcacccattttaaatatatactttaatgagttttacagatatgtacagttgttcagccattaacacaagatatgcaac

SEQ ID NO: 17092 - DNA, 201 bp, Homo sapiens
ctggcccacagactttcaggtggtgtgtatggttgggtgccagctgtggtggtagtgcaagttgaatatggctggtctcagaccctgggagaagtgcttargtgccacaggtggtcaactggcctggatgatcttcaggcccctggaaagtacatgcaggtgatgctcaggcccctggaaggtgtgtataagtgatgcccg

SEQ ID NO: 17093 - DNA, 201 bp, Homo sapiens
tacatggtggcaggcaagagagtatgtgcaggggaacttccctttataaaatcatcagatcttgtgagacttattcactatcatgagaacagcatgggaamaatcagcctccatgattaaattacctcccactaggtccctcccatgacatgtgggatttatgggagctacaattcaagatgagatttgggtggggacaca

SEQ ID NO: 17094 - DNA, 201 bp, Homo sapiens
tcactagtgtgagtgtcatacatttatttttcattgaacttaaaacagaaggactatgttagaaaagaagaaaatgaagtttagttgtgagattattatayatgaaattaatgagttatagtgtgtaaggtaacatctaactagattacaggatagggtattccactgcagttctgaagtgtcagaatagcagacagcata

SEQ ID NO: 17095 - DNA, 201 bp, Homo sapiens
acttcagcacttgaggagagcgaatttcacactcagactggtttagcctacataaactcccggtaagaatacccattcctgagccttcctctggctctttyaaagatggcatcatagatatctggggagactaacattgtgatactctgttctcacattaattgcttcacctaattataaactgaaagttaaattttagtt

SEQ ID NO: 17096 - DNA, 201 bp, Homo sapiens
attgtcctttaagaaaaaaaaaagcatagatgttttattgtaaattgtcttaacatcattctcataatcttaacgtttattattcaaaaatgctttgtagwtagctacactaagcattctaaatctttatttcttggttctagcaaagtattgacaaatttcaggttttcttttttttttatttttagagatggagtctca

SEQ ID NO: 17097 - DNA, 201 bp, Homo sapiens
cacacccagacagaaatcaaatataatttggtaatatttttatgaactaagtctgtgacaattgaattcacagctaagatatattctcatgaaagacaacrtaatttcttgagtatgaaatgcctgtgacttaaagcaagcaatttaaattctttattgtttttcaaatgaaactctgaaatgaaataggagtatgacgtc

SEQ ID NO: 17098 - DNA, 201 bp, Homo sapiens
aaagtgattaggacaaagtttctgtacttctggttatttatattctggatttattattttaaatatatagaagttttactctatggttatgaaatctgtayatttagatttttaaaaagtaaatatttagcacagtgctcttcactttcataggtaaaaaattttaaacatttctttactttatctgaaatttgttttcat

SEQ ID NO: 17099 - DNA, 201 bp, Homo sapiens
ttcatgcttaaaacacctgtgtgaagtctagattcatttttctaggggaatcaggcatcgtacttttcaggagcctttgcgtatttcaaacaaatagattrataggatagaatcagcaacttcagttgctttcttcccaaggattcagtttctctcttcccaaggatttaaactggagttgtaaccgaagccattagtagt

SEQ ID NO: 17100 - DNA, 201 bp, Homo sapiens
tgacgcccatggtgatagatatgagttttccaaaactctaacacaaaaatttatcattggccacaaatagtgtcagttgttttcctttaaatgacaggctwattttgtttatttttgagaaaatatctgccaaaaactgaagttttagtaacgatagattgttagccagtttttcaagtaaaaatggaatcccatgaaaaa

SEQ ID NO: 17101 - DNA, 201 bp, Homo sapiens
ataagaattcatttaaatgaatatctttgaggattagttagtactgataccagacaaatagaatcaaaacaagtgtcattctttagacttgtccattttasggcaaaagtataattctgcagattagagttctaaactcatgtttcatggcagcaactaaatatttaattagacaaattaactctgtcattttaaaattat

SEQ ID NO: 17102 - DNA, 201 bp, Homo sapiens
tattatttttttaatccaaggaccataatgtatcttttccttccctccctccctcccttccttccttcctccctcccttcctccctccctccctctccctmtccccatcccccaccctccctccattcctccctccctccctccctcccttcctcccttcttcccttcctcccttccttcctctctctttctctctttctt

SEQ ID NO: 17103 - DNA, 201 bp, Homo sapiens
tttaactaccattgctctttgctgagtgatgatgcagggcagatggtgtcagggagagaaatcatcaactagctcaggattgaaaggggatgaagatgctrgaaatgtgttgatgtttgagaaggatgtgtggaaatgaagaagtgactaaagaggacagccttatcaccaacaacataagcatatcccttgctctttaat

SEQ ID NO: 17104 - DNA, 201 bp, Homo sapiens
aaatgtgttgatgtttgagaaggatgtgtggaaatgaagaagtgactaaagaggacagccttatcaccaacaacataagcatatcccttgctctttaattytgccccagagggaaaggaacagggcttcagtctcaaatgagagagccacttttctagtctggggtaaagatatcatgcatacctttccttccttcccctc

SEQ ID NO: 17105 - DNA, 201 bp, Homo sapiens
aaggaacagggcttcagtctcaaatgagagagccacttttctagtctggggtaaagatatcatgcatacctttccttccttcccctccactgtgatagatytgagaagtgatgaaagccaagaaatattgagctgttggattttttttactaaatgctatgtatgccaagggttatttgcttaatatccttcatcttggat

SEQ ID NO: 17106 - DNA, 201 bp, Homo sapiens
tggtgagaaatttaaaaccgagaatttccctgaaacactggtttttaaaccttctctagtgaaggttttttttttttttttaaattttcaattacttgcaratcaatgcaaggtcctattgcacgcctgagcagtttgcaacttgcatggcatgagactcaccttatgagttcagcagcactcaaactggtctaaacactt

SEQ ID NO: 17107 - DNA, 201 bp, Homo sapiens
gggctcatcaggtagaaccattcaaagtgtatatcacttatatctcatagattagaacacatggtccagatacttattaaattattggatagatcaaattwccattaactatacctctaacacagaggctatcatctgtgtgaatatacagatgatagaacatacagaacaagaacatgcaggctcaatatttgtcactaa

SEQ ID NO: 17108 - DNA, 201 bp, Homo sapiens
tggcatgctgcatgtctgcttctttatagtgccttctttcaaatacctgaatcataaatgaagaaaaaaaaacttgagaaagatacagttgttgacatttyaaccttcttgctcttttcaaaaccaccttacctgctaacttctgttgcctctccccaccagagatgattattaattttttctttcacatggctcaactgg

SEQ ID NO: 17109 - DNA, 201 bp, Homo sapiens
aaaagacaatctttagaggatttcacagcgttttagtagtgagcaggaaaatggcagactaattgaaatgtggaaaaacctgaggtgtcatgtaaatttakaggaaaatggtccaaactgtagtcatagattcttggagtctgatcaaaggcagtgagtgtaggagtctctgtagactagttctgaaagtatctatgcaat

SEQ ID NO: 17110 - DNA, 201 bp, Homo sapiens
gttcttaaatgttagcttctttgtttggcagtattatacttgtttctttctcactgagataaatgttcctaacaaaaagagataataaatgttttgggtgrtggatagtccggttacactgatttgatcattatacattgaatacttgtatcaaaatatcacagtaccccataaatatgtataactcttatgtatttacaa

SEQ ID NO: 17111 - DNA, 201 bp, Homo sapiens
tttctcactgagataaatgttcctaacaaaaagagataataaatgttttgggtgatggatagtccggttacactgatttgatcattatacattgaatactygtatcaaaatatcacagtaccccataaatatgtataactcttatgtatttacaaaaattaaaaaagaaaaatctaacatataatttttggtcctcccaat

SEQ ID NO: 17112 - DNA, 201 bp, Homo sapiens
aaaaaaaagaaagaaagaaagaaaaccaagtcaatgttgattttattgagatgtaagagggttatattctaaatttagcagggaagaggcagatttccctmggaaagtgctatgttgtctccttcctcagctaagtttttataaaaggttgcctttgggttttcgttgtggttaaaaatgtgcaattgcttgttttgcaat

SEQ ID NO: 17113 - DNA, 201 bp, Homo sapiens
catgattttttaaaattgagaatgatattttttctttgaagagtcggttatatccattattttaaaaactgtcagttcacctgaaacagcctccccaaacraatcactctatagccaagcctcatggagaccaggtttttaccaactttttgcagcaagactacttatgtggcccagactttgggccatgaataattttgt

SEQ ID NO: 17114 - DNA, 201 bp, Homo sapiens
tcacctgaaacagcctccccaaacgaatcactctatagccaagcctcatggagaccaggtttttaccaactttttgcagcaagactacttatgtggcccaractttgggccatgaataattttgtgcaaaactcaccccatcccaatctcactgaatgttagcagtggggtgctgcagagtctgaatgaaggtggcggtgg

SEQ ID NO: 17115 - DNA, 201 bp, Homo sapiens
ggctggtgtcagctgaaaactgggctaatttattttcatcctaagtgaacttgttcatagagaaatctcatgtgaccgtagacttgggttgacggtgggcyaataaaatgggggaaagaagcgatctggggtgtgtgttcactgctcatgcagtttgcttgtgccttcagatcttaattgggacataatataagtatgact

SEQ ID NO: 17116 - DNA, 201 bp, Homo sapiens
acttacagtaaatgtgttttgcaatgctcttatatttaaaaatattttctacaaatttttaattcttatttaattttctattcatgttttattatcatttrctctttgctatatcaagagaaggaaataacagatcaaatatcaaatcaactgaggtccaaaaaactcgtccctttggcaatgaatcatggtactttgaga

SEQ ID NO: 17117 - DNA, 201 bp, Homo sapiens
aaccctgggacacccccagaatttaaaggcctttaagaggaagacgagacaaaaagagattaagaagctgtagtcagtgaggtagcagtgtgggagtcagscgggtgtgatatcacagaagcctggaggagaaggtgtttgaggacagagtggggagtggtcaacaaatgctacagtaaagccaagtaatgtgaaaacagg

SEQ ID NO: 17118 - DNA, 201 bp, Homo sapiens
aaaagtttagcatctggtcaaaaatgaaaaaggtggtttaaaaaataagcactgtccaagtttattccattgtgttttcattcatttatttgtccattttyttattcattcaacaagtgtttgttttatggaggctataaaccaaggattggggtagacccagattatgccacttattagttatgtgatcttgggaacacc

SEQ ID NO: 17119 - DNA, 201 bp, Homo sapiens
agacccagattatgccacttattagttatgtgatcttgggaacaccctttaatatctctgaatttcagtttcctcatctgtgaaacagctttactaccaastttacaggattgctataaagagtaaatgagattatttatcttttaaaatggtaaaaagttaggccaggtgcagtggctcaaacctgtaatcccagcactt

SEQ ID NO: 17120 - DNA, 201 bp, Homo sapiens
ggtggaggtggcagtgagccaagatcgcgccactgcactacagcctgggcaacagagccagactttgtctcaaaaaaaaaaaaaaaaaaagtaaaaagttrtaagtttcactttcccccttctctatttattatttattactataccccaaaagtcatacacaacaaagatggaaatcctcaaagacacagaaaagtagag

SEQ ID NO: 17121 - DNA, 201 bp, Homo sapiens
caaagatggaaatcctcaaagacacagaaaagtagagatgtcagtcaacgtttgcaagactcatagattgaactggattgaaaatctatcagtgaccagtraatgctttgccctgattaagaaaaatgaggccaaacaagaagacaacccaaagaagcctctatgtttcttcactacatcaacttgagaaacgtgggcact

SEQ ID NO: 17122 - DNA, 201 bp, Homo sapiens
aacttgagaaacgtgggcactgtgacaaccagaaatccagagaggcaactttgaactataaggccaactcaaaaaacgaatccaagtaagaatttacaacrgggaagtccaggtagaagatgcctgatggtaaatatttattcaagataaacatgtagagttccatctaataaatgcttaaatataacaaaactgaataca

SEQ ID NO: 17123 - DNA, 201 bp, Homo sapiens
tttgaaatactatacaaaaatattgtattatatttttgtaatgaaatcagaacaaagaacttcatttctataaacatactaaaatactcaaagtccttagyaagcaaccattgatggagaatcacttttaagttataaaattagcaaacatactttaaagatgacagtcaatatttatgcgtatgagattcattactcaat

SEQ ID NO: 17124 - DNA, 201 bp, Homo sapiens
attttcatcttgcagttaatgttagccttttaaacatagcatcttggccgggcacagtggctcacgcctgtaatcctagcactttgggaggccaaggcggrctgatcacctgaggtcaggagttcgagactagcctggccaacaatgtgaaatcccatctagactaaagatgcaaaactcagctgggccttgtggcatgtt

SEQ ID NO: 17125 - DNA, 201 bp, Homo sapiens
catcttgcagttaatgttagccttttaaacatagcatcttggccgggcacagtggctcacgcctgtaatcctagcactttgggaggccaaggcggactgaycacctgaggtcaggagttcgagactagcctggccaacaatgtgaaatcccatctagactaaagatgcaaaactcagctgggccttgtggcatgttcctgt

SEQ ID NO: 17126 - DNA, 201 bp, Homo sapiens
tggacgctttaagtgggctggtcccacaagtgtgggaaggcacagatgtctcagttgtcatgggccagtaataggcactgctatgggagactcaggggagycttctgcattagagtagaaaaacttagcccctccacaccttcttaggaccagagagtcaggcccacttaaaggtcctgcagtcatcaaagacagctcgac

SEQ ID NO: 17127 - DNA, 201 bp, Homo sapiens
gagccttctgcattagagtagaaaaacttagcccctccacaccttcttaggaccagagagtcaggcccacttaaaggtcctgcagtcatcaaagacagctygaccaagaatctgatgtttgctggttcttgtcctaaagctagaaagtgccacaacagatgtcttgctcacaccctgtctacctgagtaccactcccaata

SEQ ID NO: 17128 - DNA, 201 bp, Homo sapiens
ttttacaaagtgtatgtctttgactcagggcttcagaactagcagctgtggtaagagcttaggcaaggttagacctggggatgtggtggcacctgggtccrgaggtgtgggatgtcaggacactcagggactattcaaaaccatgtggatactgagtgtccaatgcagtgactttgtcataaccctagaaagtcttataaa

SEQ ID NO: 17129 - DNA, 201 bp, Homo sapiens
aagatgggtgatttctgcttttccaactgaggtacctggtttatctcactgcgaccagttggacagtgagtgcagcccacagaggacgagccaaagcaggktagggcatcacctcacctggggttggggaatttccctttcctagccaagggaagccgtgacagactatacctggaaaaatgggacattcccgactaaata

SEQ ID NO: 17130 - DNA, 201 bp, Homo sapiens
cttaaagaaaagaattttcaacccagaatttcatatccagccaaactaagcttcataagtgaaggagaaataaaatcctttacagacaagcaaatgctgaragattttgtcaccaccagacctgccttataagagcttctgaaggaagcactaaacttggaaaggaacaactggtaccagacattgcaaaaacatgccaaa

SEQ ID NO: 17131 - DNA, 201 bp, Homo sapiens
ataagcaacttcagcaaagtctcaggatacaaaatcaatgtgcaaaaatcacaagcattcttatacaccagtaacagagaaacagccaaatcatgagtgawctcccattcaaaattgctgcaaagagaataaaatacctaggaatccagcttacaaggcatgtgaagcacctcttcaaggagaactacaaaccactgctca

SEQ ID NO: 17132 - DNA, 201 bp, Homo sapiens
tggtagctagaaattagtcatggttggagtatttacacttcagaaattggcaaatactacaaatcaaaactttttttttttttttttttttttttttgccyctagggagccagttgttaagcatttaccaggacaccactaattcctcctttctcaatacctgatcttactgtttactggttaagccatgtgtcaaactga

SEQ ID NO: 17133 - DNA, 201 bp, Homo sapiens
acaagggatgccaggaggattgcttgagcctgggaggcccaggctacagtgttcgtcccaccgcactccagcctgtgtgaaagagtgataccctgtctcaraaacaaaaacaaaaactttcaatgaatctcttatgagggaaaaactgtcctagaaaatcaaagttatccatctcccagtaaactggctggatttttatgt

SEQ ID NO: 17134 - DNA, 201 bp, Homo sapiens
ctagggagccagttgttaagcatttaccaggacaccactaattcctcctttctcaatacctgatcttactgtttactggttaagccatgtgtcaaactgaraaagcaaatgtgcctgagggtaatttgatgaactcctgagcacatttaacgtattacagtgttgctaatttaagaaacaatccatttggaatttgatatg

SEQ ID NO: 17135 - DNA, 201 bp, Homo sapiens
actggttaagccatgtgtcaaactgagaaagcaaatgtgcctgagggtaatttgatgaactcctgagcacatttaacgtattacagtgttgctaatttaaraaacaatccatttggaatttgatatgccccctgaagaaggtgttttttttttttaagacaccagaatacaagtcactctttgcattaaaagttactgtag

SEQ ID NO: 17136 - DNA, 201 bp, Homo sapiens
tagcaaggcaggccaacgttcagattcaggaaatacagagaacgccacaaagatactcctcgagaagagcaactccgagacacataattgtcagattcacmaaagttgaaatgaaggaaaaagtgttaagggcagccagagagaaaggtcgggttacccacaaagggaagcccatcagactaacggcggatctctcggcag

SEQ ID NO: 17137 - DNA, 201 bp, Homo sapiens
tttcatatccagccaaactaagcttcataagtgaaggagaaataaaatacttcacagacaagcaaatgctgagagattttgtcaccaccaggcctgccctraaagagctcctgaaggaagcactaaacatggaaaggaaaaaccggtaccagccactgcaaaatcatgccaaaatgtaaagaccatcgagactaggaagga

SEQ ID NO: 17138 - DNA, 201 bp, Homo sapiens
agctaacatcatattgacaggatcaaattcacacataacaatattaactttaaatgtaaaaggactaaatatcccaattaaaagacacagactggcaaatkggataaagaatcaagacccatcagtgtgctgtattcaggaaacccatctcacgtgcagagacacacataggctcaaaataaaaggattgaggaagatcta

SEQ ID NO: 17139 - DNA, 201 bp, Homo sapiens
atattgacaggatcaaattcacacataacaatattaactttaaatgtaaaaggactaaatatcccaattaaaagacacagactggcaaatgggataaagartcaagacccatcagtgtgctgtattcaggaaacccatctcacgtgcagagacacacataggctcaaaataaaaggattgaggaagatctaccaagcaaat

SEQ ID NO: 17140 - DNA, 201 bp, Homo sapiens
ggctggttcaatatatgtaaatcaataaatgtaatccagcatataaacagaaccaaagacaaaagcacatgattatttcaatagatgcagaaaaggccctkgaaaaaattcaacagcccttcaggctataaactctcaataaattaggtattgatgggacgtatctcaaaataataagagctatctatgacaaacccacag

SEQ ID NO: 17141 - DNA, 201 bp, Homo sapiens
gctggttcaatatatgtaaatcaataaatgtaatccagcatataaacagaaccaaagacaaaagcacatgattatttcaatagatgcagaaaaggcccttraaaaaattcaacagcccttcaggctataaactctcaataaattaggtattgatgggacgtatctcaaaataataagagctatctatgacaaacccacagc

SEQ ID NO: 17142 - DNA, 201 bp, Homo sapiens
atatgtaaatcaataaatgtaatccagcatataaacagaaccaaagacaaaagcacatgattatttcaatagatgcagaaaaggcccttgaaaaaattcarcagcccttcaggctataaactctcaataaattaggtattgatgggacgtatctcaaaataataagagctatctatgacaaacccacagccaatatcatac

SEQ ID NO: 17143 - DNA, 201 bp, Homo sapiens
acttcagcaaagtctcaggatatacaatcaatgtacaaaaatcacaagcattcttatacaccaataacagacaaacagagagccaaatcatgagtgaactmccattcacaattgcttcaaagagaataaaatacctaggaatccagcttacaagggacgtgaaggacctcttcaaggagaactacaaaccactgctcaatg

SEQ ID NO: 17144 - DNA, 201 bp, Homo sapiens
catcgccaagtcaatcctaagccaaaagaacaaagctggaggcatcacgctacctgacttcaaactatactacaaggctacagtaaccaaaacagcatggyactggtaccaaaacagagatatagaccaatggaacagaacagagccctcagaaataacgccgcatatctacaactatctgatctttgacaaacctgagaa

SEQ ID NO: 17145 - DNA, 201 bp, Homo sapiens
atggattaaagacttaaatgttagacctaaaaccataaaaaccctagaagaaaacctaggcattaccattcaggacataggcatgggcaaggacttcatgwctaaaacaccaaaagcaatggcaacaaaagccaaaattgacaaatgagatctaattaaactaaagagtttctgcacagcaaaagaaactaccatcagagt

SEQ ID NO: 17146 - DNA, 201 bp, Homo sapiens
attaagaaaatgtggcacatatacaccatggaatactacgcagccataaaaaatgatgagttcatgtcctttgtagggacatggatgaaattggaaatcaycattctcagtaaactatcgcaaggacaaaaaccgaaacaccacatgttctcactcatagatgggaattgaacaatgagaacacatggacacaggaagggg

SEQ ID NO: 17147 - DNA, 201 bp, Homo sapiens
tcattctcagcaaactaacacaacaacagaaaaccaaacactgtatgttcttactcataagagggagttgaacaataatatttttattatttaaaatcatwgtgtccatgaagctgtaattcccaattaagtattacttcccttctcttaggaaactatcagtgggatttgggtgtgtgaaggagaatttcccatctattg

SEQ ID NO: 17148 - DNA, 201 bp, Homo sapiens
tggaagcagaagggtgtggggaatgcagggggtggccaaaatgtgtatgatagctttgtgaaaccaggcaacacacaggaatggtggaaattattttaatrttgttgttataatagatcaatgagcaatttaatagttcatggggttgctagtttgtttaaattttaattcaacttttccaaaagattagaactatttctc

SEQ ID NO: 17149 - DNA, 201 bp, Homo sapiens
ggaggtgctaactctcagaccactcaagaagcatttaggatttgtctctttcactagtggattcaccgatgagttaagaacatttgtaaaattcactcccyacacacacaccaagaagaaacccacttctccttaccagaagccatccatttgttgtgtcatatttgattaagttcttctggatccaaaaaatattcagtt

SEQ ID NO: 17150 - DNA, 201 bp, Homo sapiens
tgttttacatttaagtgtctgaatttaattaaaattgatattttagaataagataatctgcttttgcaaaggatttatgtttttttttttccattgtaacwaattaacctcatggtaataaatgtacttctgaaaacatttcttcttaaactacagctttgaccttgttctgcttcactgctggttccctattgctgctaa

SEQ ID NO: 17151 - DNA, 201 bp, Homo sapiens
ttaaaggatatatgaatattgaatgtctggtaaaatacagaaaactagagctgtatagaaaaatttaaatgtaaaaacctatctatttacaagtgaaaaamtacattccaaaatagatccaatggaaattagtatttaacttacagactatttggaatataataatagtgaaaacactatacaggatacaaccaatactat

SEQ ID NO: 17152 - DNA, 201 bp, Homo sapiens
tgaattatttgtttaatggaagtcaataaaattaggagattggaaagagagcaactgcaacctgatgaaagaaagaaattcattaagtaaaaattaatgarttagaaaatagcaaaagaaaaacaagaaagcttaaactacatacaaatttaaagctttcgtatgagacagtagagttaaaaggcaaaagacaaacaagta

SEQ ID NO: 17153 - DNA, 201 bp, Homo sapiens
acatcatgattgggctttcagattaggagatatgagaaagaaggtcgtgtgataggtggtaacgaggaagccgtcctccttgtgtaccacacatgttgccractctgcatgtagcctccctggaggccagcttgagactctgcattaaatgccttggttaggcgcaaaccttatggctcagcaattccactcttcaaagtt

SEQ ID NO: 17154 - DNA, 201 bp, Homo sapiens
agacacggtctcactctgtcactcaggctggagtggagtggtgccatcatggctcactgcaaccttgatctcccaggctcaacctattatcctacctcagrctccagagtagctgggaccacaggggtgtgccaccacatttagctaatttttctattttttgtacagagatgggtttcagcatgttgcccaggctgctct

SEQ ID NO: 17155 - DNA, 201 bp, Homo sapiens
aactaagcatctgagaccctacaagcttgacataattatgtaatcatgtttattatgattatttttgttgtgattatacagattttgttacctcttttccrtttactctgcctgtgcaaatatgttattttcctcactgaattgcatattgttgaaggactatattaggagtctccaaatgctcacattccctcattcatt

SEQ ID NO: 17156 - DNA, 201 bp, Homo sapiens
tgaaaaagcatgatgacaattgaaataccaagatcagaattagagtcccactaagaaatgctccctttaggaaaaacaattatttcttttgatttcagccmtgagcagcacttaatatacgtttgctaggcaccccaccagacacctccagtgaaacaagagcagaaaggcttagaggtataaagtgtctggttcctatgt

SEQ ID NO: 17157 - DNA, 201 bp, Homo sapiens
ttgaaataccaagatcagaattagagtcccactaagaaatgctccctttaggaaaaacaattatttcttttgatttcagccatgagcagcacttaatataygtttgctaggcaccccaccagacacctccagtgaaacaagagcagaaaggcttagaggtataaagtgtctggttcctatgtagtatatttaagcacaaac

SEQ ID NO: 17158 - DNA, 201 bp, Homo sapiens
caaaatatctatcctttaaaaatatattagaagaggagaaaccagcaaaatagactgaagaagaacaggagagtgtgtgtatgtgtggtgtgtacaagtgyttctgtatttatatgagcatataaacaagcataaaaatgggtttgaagaattagggattcttgtgaattttttagacattcatttgttaatgcgttcatg

SEQ ID NO: 17159 - DNA, 201 bp, Homo sapiens
ttaacttaaaactgtagttgtttctaaagcattttcattttgtttatcatgcctcaacttgatgcatattatcttaatccagaggtaaaaaggaatttttyaaattattggaatatgcagaatctagtaaacaaagttgtaaaaagaaaacaataatatttaaataagggttcagaaaatatattcagttgcatcccaact

SEQ ID NO: 17160 - DNA, 201 bp, Homo sapiens
tctatatattgtttccacatagaccagtgattctcaaccaggggtgatttttctctccagggaacttttggtaatgtctgaagacatttttgattgtcagmatgggaagttacaactggcatttagtgggttgaagccagaggtgccgctgaacatcctatgatgcacaggacatcctctacaacaaagaattatcccatc

SEQ ID NO: 17161 - DNA, 201 bp, Homo sapiens
agcaaagttagcaaactggccaaaggtcacacatctaataagtgaacgcatcaggatttgattaaacccagggttaagtctagcgttaatgcactttctawtgtttatactcaatttcaacctaatttattattgtatacaaatttagaataaacatctttatgcataatttctcatctacatttctgattatttccttag

SEQ ID NO: 17162 - DNA, 201 bp, Homo sapiens
tttatagaagagaaaagtgtcacaggaaatacacaattaaaggttttctataattataatttatatatataaattttataatttatatattacatttttawaaattattactacaaattataaagttttgattcatgtcatcagtttactttccttaaatctagagctggttcacattcctgatatcttacctaatcacag

SEQ ID NO: 17163 - DNA, 201 bp, Homo sapiens
atatatataaattttataatttatatattacatttttaaaaattattactacaaattataaagttttgattcatgtcatcagtttactttccttaaatctrgagctggttcacattcctgatatcttacctaatcacagcctacaatgttttcttttaccttcttatttaatccttggcagtttgatcgtgtctttacctt

SEQ ID NO: 17164 - DNA, 201 bp, Homo sapiens
taaattttataatttatatattacatttttaaaaattattactacaaattataaagttttgattcatgtcatcagtttactttccttaaatctagagctgrttcacattcctgatatcttacctaatcacagcctacaatgttttcttttaccttcttatttaatccttggcagtttgatcgtgtctttacctttaaaaaa

SEQ ID NO: 17165 - DNA, 201 bp, Homo sapiens
aatgcaaactcctgggctaatcccaagtcttctgaattggaatatctgggaatatggcttgggagtattcattttattttattttattttattttattttwattttattttattttattttattttattttattttattttattttattttattttattattttgagacagagtctggcttttgtcccctaggctggagtg

SEQ ID NO: 17166 - DNA, 201 bp, Homo sapiens
gagaatttttaaacccatagcctttgattttactgtgaagcacattgatgtaatagtgagaatcatgccctaagtctgggtttaccagaaattcagctttygaatcacatccttcccaagtccctgtcagctgtgagcaatagcaaatcatttttccagtagcttaggagcctgtgaatggattctgttcacagctttaac

SEQ ID NO: 17167 - DNA, 201 bp, Homo sapiens
agattttgtcatgctatgcttacgggccaaagcacccagaggtgtaacaaacacttggtgtttagctatattttagggcaacagattccgaatcttccccsagcttggggattcagtgtgtctgcctagatcttcctgagtcacctcccagttgatatgtgaaagaagcctacaagcccaccgtctttcatatatcctccc

SEQ ID NO: 17168 - DNA, 201 bp, Homo sapiens
accattcttaggagcttttcctgatgggtcactgacaaacatggtgcattcactatgaactttacgatcttcatgacacaaagtgaagaataaattagaakaaattgtgttaagcacatttcattgattcatggagtagaatttcccttcactaaatcaatgcaatgagacatttcagttggggaagggggaagcagagac

SEQ ID NO: 17169 - DNA, 201 bp, Homo sapiens
gttggggaagggggaagcagagactatggtgttttctagatagactatggggttttcagaattatgtcatctgcaaacagggacagtatgacttcctcttyctatttggatatcttttatttctttctcttgcctgatagctctggccaagacttccaatactgtgttgaataggagttgggagagagggcattcttgtct

SEQ ID NO: 17170 - DNA, 201 bp, Homo sapiens
aagattatgtcctttgcagcaacatggatgaagctagagaccattatcgttagcaaatgaacacaggaacagaaaaccaaatattacatgttttcatttayaagtgagagtcaaataatgagaacaagtgacccaaggagagaaacaacagacactggggcctatttgagggtggagagtgggaggagagaaaggatcaga

SEQ ID NO: 17171 - DNA, 201 bp, Homo sapiens
ggatcagaaaaatacctattgttggtacaccaaacccccatgacatgagcttacctatgtaacaaacttgcatgtgtacccctgaacctaaaataaaagtwaaagggaaaaaaaagtaaacatgttgtagaagtcacaatctatgacagtcttgttctttgccttctccattgcttcttagtaatctgtaaagctattgtt

SEQ ID NO: 17172 - DNA, 201 bp, Homo sapiens
gaaaaatacctattgttggtacaccaaacccccatgacatgagcttacctatgtaacaaacttgcatgtgtacccctgaacctaaaataaaagttaaaggraaaaaaaagtaaacatgttgtagaagtcacaatctatgacagtcttgttctttgccttctccattgcttcttagtaatctgtaaagctattgtttctgat

SEQ ID NO: 17173 - DNA, 201 bp, Homo sapiens
tccttactgacaacaccccaaaacttatttttaacccactttcttttgttactttttttccttggcttaagcattgattacacatttattaatagacaaartttctagtagtcaattatgtaccttccaatattgagatcaatttttgctcaattctcaaaattttgagaaaagcaactgatccaaattttatttcttcac

SEQ ID NO: 17174 - DNA, 201 bp, Homo sapiens
ttaattttcctgggttagtaccaccctcagaggaactagcagaagccccccccgccaaaaaaaattatttcctctctgtaaaaatgcaaattcgacccagsccttaactccccaagatagagttctaaggaaaatgaatagcttacaaagaacaaaggaaggaaggacataggaaataaaccactactgagaataggagaa

SEQ ID NO: 17175 - DNA, 201 bp, Homo sapiens
gtagtgatatgaatacactgaccagaataaagtccaagccagaataaaatccgaaagaaaaggattgagatcacagattgtgttagatgagttctaacatrttctaatcaaagttctagaaggaaatagtagaatggggaaacacagtattcaaagacgactaacagaacgttcataacagcactgtttgtaatagtgaaa

SEQ ID NO: 17176 - DNA, 201 bp, Homo sapiens
gtgccatgaaccaaggattatagttaatccaattccgtatactaaaagtacattgaggaggtaggaggagagagagaggttgagaattttctaaaattgtygaagtctaacaattcttagaatcaggaaataaaacaattctcaaataggatttttaagaaatgatacataataagtaacaacaagacacatcatagtgaa

SEQ ID NO: 17177 - DNA, 201 bp, Homo sapiens
tgtatgctgtgctatgtgtgcccacataatacataggaaatgctaaattggtatcgatttctgaaaataaaaatgcctgttcttttttcaaattatgcaawcctgataagcctactaggcatatacatatatatccttttaactaatcacgttatcatttttttccaacaaagaatataataaatgaaagtcaccttctgg

SEQ ID NO: 17178 - DNA, 201 bp, Homo sapiens
gattagtggcagttgacttggagtttcagcccttcctcaggactttttggcatagtaataacattgcaaagttgctcacatttttcatacccttccatttkatctgtgtgtgtgtgtgtgtgtgtgtgtgtttgtgtgtcttgtatgtggaatattcttacagctagtgacttaatatgctgatgaacacagagagctgga

SEQ ID NO: 17179 - DNA, 201 bp, Homo sapiens
taaaatggacagaaaatatctaaacaattgttgtgaagttttcttcacactgtattgctaaacaggatgtctttattggagctatgtgactacattcttcrtagaatggcatatggaactctgcccagctttaatgccagaggtcagaatgtgcccacctcctggcagctgaggatgaatggcttaagtgacaaattccga

SEQ ID NO: 17180 - DNA, 201 bp, Homo sapiens
acctagagctgtcactacaaatctcactgtgagtgttaagaattcatgaagaaattccaatttattgatttgcaaggatttgcctatgaaggtagagagaytgtatcttaaaattgccattccattaaaggctaaaaaagtcatttcaatgactaaagttcttatatcttttagttgactatttgtaaagtgaactttttt

SEQ ID NO: 17181 - DNA, 201 bp, Homo sapiens
caaggaatgagcaggactttaacattctagtcctctgtgtcagctgtctgtgttacagaatttatttgaactatagagtccctaaatcactacagcataascctcagggaaaataaaaactcaaaaatgtataaacaaactatactaaaattgagctactgagcaccttagtatacttgcttccctttagttaacgtattt

SEQ ID NO: 17182 - DNA, 201 bp, Homo sapiens
gattactcttctttttcaaatccccacctcaaggtattctcctcacacttccgccacccacatacacccctgatgctccatccaccaagcagccatatccrcaggccacaggtgcaccatcctctgccctgtttctgcacctttgcatgtgtagttcctcctgcctgcaagatgctgtcatttattctataccggatgaac

SEQ ID NO: 17183 - DNA, 201 bp, Homo sapiens
aacagaactttcttcctcacagatataagaaaatgtcccacttttcctgattgatttgtgcttattgattactgaacttagagctcggaaacttgaatttycattttatgaacgctctcaatttattgtatggccttggaaaaattatgaaacctttttgactcttagcttttgaaaaagcaaataataagtctacttata

SEQ ID NO: 17184 - DNA, 201 bp, Homo sapiens
tcagtaacttctccgaaataggtaataatagtgctaactgggaggtatttaggacataaaggtgttggggtgtgtgtgtgtgtgtgtgtgtgtgtgagagwgagagagagagagagagagagagagagaaataagacatttttgctaaagaatatctgaagaaaaaaaaggccaaggacaaaatgttgtagaaaaaaccgg

SEQ ID NO: 17185 - DNA, 201 bp, Homo sapiens
gacaatgtgacaattgctcttttaaattcctgactgagcacacaggaggatgagaaattcctgggtaagaaaataaaaagggagctggaaagcagagggcytatggtgaagccacagctgtccttggggcatttgctatcactgcacacaagagctttggatgtacttagacatatggagataggagaaaatacttcagcc

SEQ ID NO: 17186 - DNA, 201 bp, Homo sapiens
aggaaagattttggactatatttaaaaaatttaaagaaataaaagagcaaatgacaaatttgagaaaggaacactttctaaagacaagtcatatttttaaratagccaaatagaacttgaaaaatgaagtgcagttattgaaattaaaattttatgaatagattaaacagctggagagagactacataaaataggttctac

SEQ ID NO: 17187 - DNA, 201 bp, Homo sapiens
tataaaccagctcctatacacgattggatatataactgaataaattacctagaatgtaacacagaaagatggaaagataggaatgtatataggacacgaasgacaggctgtgaagatctaatatatgtttaatcatcattctagaggagaataggagaatgactaaaatgtttccagaactgatgaaagtcatgaattcta

SEQ ID NO: 17188 - DNA, 201 bp, Homo sapiens
atacacgattggatatataactgaataaattacctagaatgtaacacagaaagatggaaagataggaatgtatataggacacgaaggacaggctgtgaagrtctaatatatgtttaatcatcattctagaggagaataggagaatgactaaaatgtttccagaactgatgaaagtcatgaattctaagatctaggaagaac

SEQ ID NO: 17189 - DNA, 201 bp, Homo sapiens
agccacttttaacattcggtacagatttatcttatgctatattgtattatactgttatatgatttaaaagtgtgtgtgtatatacatatatatatatatakagagagagagagaaatcatattgtacatttgggcttgttagctttctttttcacttaatagtagagagtgaattttttttttcatatttactattctgtt

SEQ ID NO: 17190 - DNA, 201 bp, Homo sapiens
ttcactttatagatagtatcctactatttttatatagaataactttctcttgtataccctgagacatccaaatttgtttactttttcctccaggttttacytccagtattttaatccgttttcttaatatctgctaaatattcaagctctccctttcatttgagcagtagagcctcaggcaaaatgcagagcccctgcaag

SEQ ID NO: 17191 - DNA, 201 bp, Homo sapiens
ggcctaaaagaaacatctttgacccaaccctggtatcttgataaacaccgtgccattcccttcatttttctgccaaactttcacagtatgacttatacttyctttcagccccctttccacattctgcacctcaccctcctaatccagcttctggcccccctttaatcctatccacaaacccccatccccacagaaaagctc

SEQ ID NO: 17192 - DNA, 201 bp, Homo sapiens
gtgctattgagatcattaaacttgagtattcattaaaaaaactcatgaagaacacatacttaacaaatgtttattgattacctttcctcatgtgaaagctkcatttttttaggtttctgaaggataaacaaagctacacatatgacaaagtgcttacactaagcgggttatactatagtgtccaacaggtatggtgagcat

SEQ ID NO: 17193 - DNA, 201 bp, Homo sapiens
cacatacttaacaaatgtttattgattacctttcctcatgtgaaagctgcatttttttaggtttctgaaggataaacaaagctacacatatgacaaagtgsttacactaagcgggttatactatagtgtccaacaggtatggtgagcatatgttcaaattgaggatggctaggaaaaaaatttacaagacaaatacatggt

SEQ ID NO: 17194 - DNA, 201 bp, Homo sapiens
gatttagcaaaggtggcttgggtatttattctcacctgttgggcactacagtataacccttttaatgcttagccaaatccttaaatacttcctggatactmtaatagcagagttacccacaggagtgatatgaagaaataatatgactgaggaaggtatacatactgcaactgtagagtgaggaagaatagtggaggtgaa

SEQ ID NO: 17195 - DNA, 201 bp, Homo sapiens
cttataattcccatatgtcttgggagggacctggtagaatgtaattgaatcatgggggtggtttcccccatgctattctcatgagaatgagtaaattcttrcaagatctgatggttttataaggggcatccccctttgcttggctctcattcttcttgctgctgccatgtgaggagggacatatttgcgtcctacaatacc

SEQ ID NO: 17196 - DNA, 201 bp, Homo sapiens
caacatgctccaaaacaaccaaagggtaaattaagaaattaagaagtacattaaaaaatttcttgaaacaaatgaaaatataaacataatatatcaaatcstacgcaatacagcaaaagcagtagtaagaagaaagtttatagcaataaacaccaacatcaaaaaagtagaaagatttcaaataaacaacttaatgatgca

SEQ ID NO: 17197 - DNA, 201 bp, Homo sapiens
aaaccattagctaaactaagacaaaaagacccaaataaataaaatccataatgaaaaaatgaaacattacaactgataccacaaaaaagaaatattacaamtgatacttcagaaatacaaaggattattggagacttttatgaagaattatataccaaaaaatggaaaacctagaagaaatggatacattcctgggcacat

SEQ ID NO: 17198 - DNA, 201 bp, Homo sapiens
cttatatgacaaaaccacagctaacatcatactaaacaaggaaaatctggaagctccttctctaagaactagaacaagacaatgatgtccactttctctaytcttatttaacatagtactggaagttctagccagtactatttggcaagagaaagaaatgtggctagttccagttgtgatgtgctgtaagtgtaacatata

SEQ ID NO: 17199 - DNA, 201 bp, Homo sapiens
agagagagagagagaaatcatattgtacatttgggcttgttagctttctttttcacttaatagtagagagtgaattttttttttcatatttactattctgktacctcattcttaatgattacttagtctacagtgggtgataaatcctctctttttggatgtttatattatttctgataacaatttcattttaactgttgt

SEQ ID NO: 17200 - DNA, 201 bp, Homo sapiens
gtaagtgtaacatatacattagatttccaatactttctacaataaaagaatgcaaaatatcttattaatacattttattttcattaattgattacatattstattagtttgctagagatgccataacaaattatcatagactaggtgggttaagcaagataaatgtatttttcacaattctagaaggtagaagtctgagat

SEQ ID NO: 17201 - DNA, 201 bp, Homo sapiens
tttgcttctcaagggcagagaccagtgtgtaaagcttaatatccttgttcatagtatccctactttatgggttcattgttttccccacatattaattaggraagaaagtgaatttattgaatgaacccctaaccaaaccacacatatttcccatttctgtgtcagtgctatcattttctaattatgcccaacagcagtaac

SEQ ID NO: 17202 - DNA, 201 bp, Homo sapiens
atttgaaaactgatgactgttaattattttctttgtctgccttcctaggaacatttcagagaaagctattatttttgtcttttgaccagcaaatctatatrtctttctttacagcctggtaatttcagaacgaatagaagtgtttgtatctgtgggtttgacacactactgaatcacaaagtctttggaataattctcaaa

SEQ ID NO: 17203 - DNA, 201 bp, Homo sapiens
tagaagtgtttgtatctgtgggtttgacacactactgaatcacaaagtctttggaataattctcaaaagccatcacttttagcccactttctcattcattratgctctattctttttctagcatgtctagcagaattctcttgaattcttgcagtgaattggtgctccttaaatacctgctattttggaatagttttgact

SEQ ID NO: 17204 - DNA, 201 bp, Homo sapiens
caagctcgtatatataaatattgtaaactgagatgtcgcttatgtcatttacatcatttatctcaaataataaaaatggttcactttttttgagcactacwatatgtctgacactgtggtaagtgccttttctgcattattctcacttggtgatatcacacctgccctgtcctataaaatgtataatgtgcatatattacc

SEQ ID NO: 17205 - DNA, 201 bp, Homo sapiens
atgtgcacattgtgcaggttagttacatacgtatacatgtgccatgctggtgtgctgcacccactaactcgtcatctagcattaggtatatctcccaatgmtatccctcccccctccccccaccccacaacagtccccagagtgtgatgttccccttcctgtgtccatgtgatctcattgttcaattcccacctaggagtg

SEQ ID NO: 17206 - DNA, 201 bp, Homo sapiens
tgtgcacattgtgcaggttagttacatacgtatacatgtgccatgctggtgtgctgcacccactaactcgtcatctagcattaggtatatctcccaatgcwatccctcccccctccccccaccccacaacagtccccagagtgtgatgttccccttcctgtgtccatgtgatctcattgttcaattcccacctaggagtga

SEQ ID NO: 17207 - DNA, 201 bp, Homo sapiens
caaaatttaaaataatacagaattgtttcaaataataattgcatccttctataaaatttgccttagaatagttttaatttttattataaatgcagccatarttgttgatctttaagcaatcttgactctctttgtttttgccactttataaaatgtagacaaatctgatagccaaggtaaataccagaattagggtaaagc

SEQ ID NO: 17208 - DNA, 201 bp, Homo sapiens
ctctcagtatatttttatcatcttcacaaagttatttttctgtaaactaaaggtttgcctaaattgagataagctcctttaaattttaatttattttttasttgggtatgagcatttacagtgacagaagaagttctggttttggcaactttggaagtagctccccaactttgggacatgtacgtgttgtctgtatgatga

SEQ ID NO: 17209 - DNA, 201 bp, Homo sapiens
tggacttagcaaaggtggcttgggtatttattgagcaagctgttggggaaagatatttgatgtcttagatccagaatgtttttaaatgctgctcacttgawttttttttttttttttttttttatggaataagggatctgatactctttttctgcttggagtctggacctcagttactgctctctgagatactggcacaga

SEQ ID NO: 17210 - DNA, 201 bp, Homo sapiens
agtaagttatggtaatttttataaatgacttcacatttacaatgctggtgtttttattggttaaattagatttctcaatagctatttttaaaaactgcaakaggaaggactgtctattgtattttttagaaacaagctggtttctacaatattattcacgttttttaaacagcatcattgaacctgcacataaaaggttaa

SEQ ID NO: 17211 - DNA, 201 bp, Homo sapiens
gaaatgaaagttgtagagatatacagcaaacttttatgtaaggaaataagcatatgcaaaactaatacatgtatttaaactaacacaacctcaaaggaatraaagaacgtaagtggtacaccagtgcaaagggaaataataggtgaatattagatgttaattgaaaatttcattcattcattcatttcacaaatatttatt

SEQ ID NO: 17212 - DNA, 201 bp, Homo sapiens
caaagtatgtacatttccaaagaaaagcacttcgtgtctacatggaagcaataaattatttccccattttacattcataattaaatctttccaaatgctasaaagtagccagaccactaacaataatacctgtgtcatgttctggggcttagatggttcaagctgacttgaaatggagaccatttgttctaaattgatttc

SEQ ID NO: 17213 - DNA, 201 bp, Homo sapiens
gcacacacatatataaaatatgttaatatgattattttcagcttctaaaatctatggaatgctattttaacctgggaaagggcttcttgctttattccctyggattaaaaactcagtgaattttatttttctaaggtaaggatgctataacctcaaatctgaaaatcctgcttgactagccatcaatgggtctaaataacc

SEQ ID NO: 17214 - DNA, 201 bp, Homo sapiens
ttctaaggtaaggatgctataacctcaaatctgaaaatcctgcttgactagccatcaatgggtctaaataaccttttcaaggttatttatagtagtcagartatgatacttaaattatgtttgatttagttcttttggtagttaactttttacagtacaaataataccacaagttatttgagaaatagtcttttagataag

SEQ ID NO: 17215 - DNA, 201 bp, Homo sapiens
gagccccaaagtagaatttaggagaactctgggttctaaatctggttctgctacagactctgttgacctaaggtgagtctctttcatgtgtctgtttcctycatatgtaaaatactaattgtagtaagtgtatctgacttagggatttgttccagaagatggtacaaatgaaagtactgtgaaaaatataattgtaagaaa

SEQ ID NO: 17216 - DNA, 201 bp, Homo sapiens
attatgtagtattttagataatgttaaatgctatggaaggcaaaaagtttagggtaagggaactgggagtactggattgcagttttatggagtttttgtaygtcactaagtcttcctggagctgaaagggtgatccaagtggctatcttgaggaagagtattccaggcagaagcaggagccagtgcaaggctgggtgcagt

SEQ ID NO: 17217 - DNA, 201 bp, Homo sapiens
tctgtataccactggcatacagacttcccagaaagtccctgaagtgtctggaaactcccggaagtccccctaccttcattccaaactccaattttagtgtyacaaagctaggttagcagaaggagagaagagtatctctaaaattttgcttaaatgcaaaataaaaaatgttaacctctatgccctatttaactatgtcgc

SEQ ID NO: 17218 - DNA, 201 bp, Homo sapiens
ataaaaaatgttaacctctatgccctatttaactatgtcgcttgatacctgtactgttgcaacagctgtctattgttctcctgtctcgatgtacctaatgycaatgtagcctatagacagtaaaaatcacagcattttttggaaggggcactaactgtgtgctgggcatcatgctagacaacttgtattcattccttcctt

SEQ ID NO: 17219 - DNA, 201 bp, Homo sapiens
cttacttgcttaaacgctttcgctggcccctcattgccaagcaaataaagttcaaacacttttccttggcattcaaggccttcgcatctgcctcaggattyctggccaaacttaccttccacaactatcgtgcataaacctctactccacagagggtttcctaaatacatcttgtgtattagattactttcacctttgaat

SEQ ID NO: 17220 - DNA, 201 bp, Homo sapiens
acaattaaatatatacttgcgtttggcctttcttaaagatattcatgagtctagataagagttagctttctcatgtaacagagaaactgaaaaattcaaayggcttatttttactaggcttaagttaattgctgcactactgtaaaataatgatacttaaacaaaaatttacttttttaagcactcaatcacagtgagata

SEQ ID NO: 17221 - DNA, 201 bp, Homo sapiens
agccctaaggtggacacatgcctggcttactgaggaaaagcagtgagactagtgtggcctgtagcataggaaattcttgtttttgtcaaccaaaaataaarttctaagcccaccaaccatttgaatagacccctcttcttggccaagggcattccaaagttaacctgagaaactagttcaggacatgatggggaggggtag

SEQ ID NO: 17222 - DNA, 201 bp, Homo sapiens
cactgcactccagcctgggtgacagagcgagactccgcctcaaagaaaaaaaaaaggaggttgtagaagactgtgttctatggtatacagaaaagcaattyatatatatagagagaaaatatatacttatacaaatgtagaatacagttaaaaaggatgcacaagaaacttctatagttgtttcaacagagtgaaggggta

SEQ ID NO: 17223 - DNA, 201 bp, Homo sapiens
tccagcctgggtgacagagcgagactccgcctcaaagaaaaaaaaaaggaggttgtagaagactgtgttctatggtatacagaaaagcaattcatatatakagagagaaaatatatacttatacaaatgtagaatacagttaaaaaggatgcacaagaaacttctatagttgtttcaacagagtgaaggggtagggagagg

SEQ ID NO: 17224 - DNA, 201 bp, Homo sapiens
taatataggcatgattgttgtatacagtcactaatcatatataagatagatcattgtacatctgaataatacgtgttgacaattataagtggattttcagkcttaattgtgaaacaatatagctaataaataatggacctagaaacacacatagttggagctgtagtctcaccttcctatacttacagtcaaaatatacac

SEQ ID NO: 17225 - DNA, 201 bp, Homo sapiens
cccagaaacagaaagcaagtcttgtgaaagtcagaatctgggagctttgcagatgcgtcaaggtagccttcagattgcctctctgttttcaatgtgtcccytatctcactcttccaaacatcctatgctgtaagagggtaaaaggaaaaggaaaataagaaaggatctacataaggcaaagtacaagtaacataaatgcag

SEQ ID NO: 17226 - DNA, 201 bp, Homo sapiens
tgcttccacatcccatgacaaataatagcaaatagctctgtcattgttctctttggggctctaaattgttgaagcttcagccattgcagggaaagccttcytgagtttcaggggacccagccctgccctgagtttcacctgactgatagaggaaaacagccaagacaggagtctggcagagaagccactggccagtgaaaa

SEQ ID NO: 17227 - DNA, 201 bp, Homo sapiens
gatatcagattgggttggatttagctcagaggccatattttgccaacttttaaacaatgtatttatttatttatttatttatttatttatttatttatttrtttgtttatttatagatggggtctcactctgtcacccaggctggagtatagtggcgggatctcagctcactgcaacctctgcttcccaggctcaagctat

SEQ ID NO: 17228 - DNA, 201 bp, Homo sapiens
gttacttatatcaaacacttgcctgctagctgtgtttggcaggccagcaggatgaggtaataatcagaagaaaatgttctggtttattggcctcatccacrtacaacattattcaaaatagttctctgtgggtgagaacagagttgctttgagatcccctggtctaatgttctgtagtagtgaggaggaacaaaactgtaa

SEQ ID NO: 17229 - DNA, 201 bp, Homo sapiens
acagagttgctttgagatcccctggtctaatgttctgtagtagtgaggaggaacaaaactgtaaacttttttgatctcttctagaataatggtaaggtaartgatatctgcttggcccatcctttcagtaatgtttacaggcagttagatgtatgtgaaaatgagagcctttcatttataaacattttggctttactcttt

SEQ ID NO: 17230 - DNA, 201 bp, Homo sapiens
cccagctaattttctgtatttttggtagagacagagtttcaccatgctgcacaggctggtatcaaactcctgagctcagcgatccacctgccttggcttcycaaagtgctgggattacaggtgtgagccaccatgcccagcctcaattccttacttaaaatacaattaaatttttgttaattttcagatgatatagtactc

SEQ ID NO: 17231 - DNA, 201 bp, Homo sapiens
tgttggtccaataatcacttattattgtacaatattggaaataagttgtcttggtgtgagttcatattaaagtgtttttttttgttttctttttttttggkgtttcctttttttttttttttttttttttttttgaggcagggtctcactctgtcacccaggctagaatgcagtggcaaaatcacgtctcactgaagcctt

SEQ ID NO: 17232 - DNA, 201 bp, Homo sapiens
tccaataatcacttattattgtacaatattggaaataagttgtcttggtgtgagttcatattaaagtgtttttttttgttttctttttttttggtgtttcytttttttttttttttttttttttttttgaggcagggtctcactctgtcacccaggctagaatgcagtggcaaaatcacgtctcactgaagccttgacctt

SEQ ID NO: 17233 - DNA, 201 bp, Homo sapiens
ctccggacgcttgcctagctgggctgaggcaggctgaggcctgtttgttgttagcccagctgcaagagcagtggccttagtaacgtcagcaggaacagagmaggcttcatctctaccctttgtctggatttggtgctggtgtgttttccccgctgctgccatgtgatggctcgtaagcagcactacacactggatctgtaa

SEQ ID NO: 17234 - DNA, 201 bp, Homo sapiens
tttctagtacagttgtatatacagatttttgttgttactgttttagaaaaaataaataaaatgtttatttcttctgcaaggtttagtgaggagctctttargatttttaatgactaagtacatatttgggttcctttaactgcaactaggcatatttccaagatatcatagttactttgagagaacatgaacattttatct

SEQ ID NO: 17235 - DNA, 201 bp, Homo sapiens
agtagctggaaccatgggaacacatcaccatgcctgactgatttttttttaaaaattattatttgtgaagggacctcgctgtgttgcccaggctggtctaraactcctgggctcaagtaatcctactgctttagcctcccaaagttttgggatcacaggtatgagctactgtgcctggcctatattaacgttttaatcctc

SEQ ID NO: 17236 - DNA, 201 bp, Homo sapiens
gtgaagggacctcgctgtgttgcccaggctggtctagaactcctgggctcaagtaatcctactgctttagcctcccaaagttttgggatcacaggtatgarctactgtgcctggcctatattaacgttttaatcctctatgagagtatcctacatcattgcatttttttttccaagaaaagaatgatgcaaaattagagaa

SEQ ID NO: 17237 - DNA, 201 bp, Homo sapiens
ctagaactcctgggctcaagtaatcctactgctttagcctcccaaagttttgggatcacaggtatgagctactgtgcctggcctatattaacgttttaatmctctatgagagtatcctacatcattgcatttttttttccaagaaaagaatgatgcaaaattagagaaaccaattatttgcatttttggttcacagggttt

SEQ ID NO: 17238 - DNA, 201 bp, Homo sapiens
ctgggctcaagtaatcctactgctttagcctcccaaagttttgggatcacaggtatgagctactgtgcctggcctatattaacgttttaatcctctatgaragtatcctacatcattgcatttttttttccaagaaaagaatgatgcaaaattagagaaaccaattatttgcatttttggttcacagggtttcatttaaga

SEQ ID NO: 17239 - DNA, 201 bp, Homo sapiens
agaggaagtcgggaaaactatgggatggtccagaaggactgaggaataacagttaagccaagaacaaaaggatcaagagaagtcagtttcattcctttctmtcttggctacaagccttgatccaagctatcacatattcatgaaacgatttccaatccatcatgccatgctgtatcctacttctcactgaatttgtagtct

SEQ ID NO: 17240 - DNA, 201 bp, Homo sapiens
agaactctaaagacttgcttttctgatttttagtgctctgtaaattacaagcataatatagaacaaattggagaaagtcaaaaaggcaatgagaagtgatmataatatcctgaaagaaaaaggaaaattatatgtgagaaataaaaattcaaaagccatcattgtctgaaacagtataccttattagttcctgagttcatt

SEQ ID NO: 17241 - DNA, 201 bp, Homo sapiens
attgtatagataatatatagcacagttatataaatgcatggatagtaaagagttcagaaacagaacagttaaccattggaaaaagtgttaaatccagtaasatgacaaattcaaatgtttcataaaggagaatttcagaaaatggatttttgcaattcacactttgttattgaagtcaacttcttaaaaatcttgtttagc

SEQ ID NO: 17242 - DNA, 201 bp, Homo sapiens
aacagttaaccattggaaaaagtgttaaatccagtaagatgacaaattcaaatgtttcataaaggagaatttcagaaaatggatttttgcaattcacactytgttattgaagtcaacttcttaaaaatcttgtttagcaagtaattatgagatgttatttcaaaaattttaaatccattacatatcctcattcaacaatga

SEQ ID NO: 17243 - DNA, 201 bp, Homo sapiens; identical to SEQ ID NO: 2186

SEQ ID NO: 17244 - DNA, 201 bp, Homo sapiens
gaggctgaggcaggaggatcacttgagcccaggagtttgagactgcagtgaactgtgatcgtgccactgcattccagcctgaggagtggaatgggaccccmccatctcttaaaaaagaaaaagaccaaatgtaagagcaacaagagctctcaactaagggcaattcatctggagctctggtactttgtcaaaggagtatct

SEQ ID NO: 17245 - DNA, 201 bp, Homo sapiens
ggccttttttgtgagattttaacagaaaagaaaaaagctataaggaagacctcctcagagatctggccagaggaatgtcaccataagaccaaatttcagcrttgacatagagccaaaagaatgagggtaattcatcattcttgttaataattgagtcttttatatataaattacacccatgttccagatacagctttccaa

SEQ ID NO: 17246 - DNA, 201 bp, Homo sapiens
attccatggtgcaaaataagaagctttttgagtgagctcaaatggctcatacctagaacattgctagtagccaggaaaagtcctgggaactgctaacttarctatgtgatgtcccttcatttcctttgcatgtctgcatgtttttgtgtgtgatttgaatttgacttttgtgagctatttttgcatgctattatttgggtt

SEQ ID NO: 17247 - DNA, 201 bp, Homo sapiens
tctaattgttttctctagtggtcaatgagcatcttgagagtgaagaccatgccttatttatgttgtattctaaacacctccttatagctcctgggaaattyataggcatttatataaatgctccttgaatgaatgaatgtgttcccccaacatccttactgaatactgaatttgggatcttgtgaaatcctactcagttta

SEQ ID NO: 17248 - DNA, 201 bp, Homo sapiens
tccttgaatgaatgaatgtgttcccccaacatccttactgaatactgaatttgggatcttgtgaaatcctactcagtttaagctttagtggaggtgttgamaaaaaactaagctctgtaaaacatttcaaaaggtttattatgagcccatattaatgactatagcgcaggaaacagcctcaagaagtcctgagaaagtgag

SEQ ID NO: 17249 - DNA, 201 bp, Homo sapiens
ggggaggcttaggattttatttttgatttacaggggcaaatacagtagaagtttgtattccatgaaaatttaataacacaaaatttagtacatggaatttwttataaatggaaagactagtacatttattggctattttgaagagagttattttgcaatatgaatcaatgaataacttatatcattgcttctttgcttcta

SEQ ID NO: 17250 - DNA, 201 bp, Homo sapiens
atatgaatcaatgaataacttatatcattgcttctttgcttctatagaaaccaaataactttctatgactgggacaggtagtacctctatgtttaaataaytattttctcttagagtgttataatttgtatttctcatcattaatagaaccagttttactgccaacatgaataaaacactctcctttttacattattttat

SEQ ID NO: 17251 - DNA, 201 bp, Homo sapiens
aggaaaattttctgttgaagagatgcctaagttgaatcttaattagtagaagctaactgggctgtattagtctgttttcatgctgctgataaagacatacstgagactgggcaattgacaaaagatagaggtttaatggactcatagttccacatggctggggaggcctgacaatcatggcagaaggtgaaagtcatgtct

SEQ ID NO: 17252 - DNA, 201 bp, Homo sapiens
aaaattttctgttgaagagatgcctaagttgaatcttaattagtagaagctaactgggctgtattagtctgttttcatgctgctgataaagacatacctgmgactgggcaattgacaaaagatagaggtttaatggactcatagttccacatggctggggaggcctgacaatcatggcagaaggtgaaagtcatgtcttac

SEQ ID NO: 17253 - DNA, 201 bp, Homo sapiens
tggtgtgatctctgctcactgcaagctccacctcccaggttcacaccattctcctgcttcagcctcctgagtagctgggactacaggtgcccgccaccacrctcggctaattttttgtatttttcagtagagacggagtttcaccatgttagctaggatggactcgatctcctgaccttgtgatctgcctgcctcagcctc

SEQ ID NO: 17254 - DNA, 201 bp, Homo sapiens
tgggtccctgccatgacatgtggcaattgtgggagttacaattcaagatgagatttgggtggggatgcagccaaaccatatcacaggttatgatgtgtgtrtatgtgtttgtacttgtatttttatgtgtatgtgtatgtatgtggaggcatctgtgtgtttgggagaacaaggaaaagggctgtgatgttcctgaaagtg

SEQ ID NO: 17255 - DNA, 201 bp, Homo sapiens
gagttggaacagaagcttggaagtgagaaacactgtgaggttgctggagtatatagtgtgtctgtgtgagtttaggttggagtgggatacacaaggagctygtggacaaagggaatccatcaaaggtgttggagcaaggggatggtatagtcagctttacatgctgagtggattgctgtgattacaatgggcaggatagat

SEQ ID NO: 17256 - DNA, 201 bp, Homo sapiens
tatacagttgtctttcaaaccaaaaaatggataaaattgccccggaagaattaaaaacaacaacaacaaaagtgaaaagaaagtaatcctgggaagcaccrgcattgaagtgtcaggagacagagaagtccataaagagaaggaaggggtcaaaagataggaggaaaagtgagtggcatcagggaggaagccaaggaggta

SEQ ID NO: 17257 - DNA, 201 bp, Homo sapiens
aacaaatataatgaatgataactagtgtgtgattaggtaaagagagggctccactttttataggatggatgagacttagtacatttgcagaacaagagaargtggcagtgttgaaaggtgcggactttaagaggtgattggatcttgaaggctctgccatcatgaatggattaataccttcgtgggttagtggattaatgg

SEQ ID NO: 17258 - DNA, 201 bp, Homo sapiens
acatttgcagaacaagagaaagtggcagtgttgaaaggtgcggactttaagaggtgattggatcttgaaggctctgccatcatgaatggattaataccttygtgggttagtggattaatgggttaattaatgggttattatgagggtggaactgatgatttcataagaagaggaagagaaacctgagcagatacattagga

SEQ ID NO: 17259 - DNA, 201 bp, Homo sapiens
aagacagttcagcggtttcttaggaaactaaacatatccttaacatattatccagcatccttaccttgccatttactcaagtgcgatgaaaatttgtgtcyctacagaaactggcacataaaggtttatcacagctgtattcataattgcccaaacttggaagcaaccaagatgtccttcagtatttactttatagtaaat

SEQ ID NO: 17260 - DNA, 201 bp, Homo sapiens
atctcagaggatttttagggcaatgaaaatactctgtatgatactatatggtggatacaacatttgtcaaaacccatagaatatacaacaccaagagggamccctactgtaaactatggactttgggtgataatgatgtatcaatataagttcatctattgtaacaaatgtcccactctggtgatgcatgttgatattggg

SEQ ID NO: 17261 - DNA, 201 bp, Homo sapiens
gagattgttttcaaagctgtttaccatgtaaaccaaaaataaaattccaagccccccatccacctgaatggatgactctcttgtcaaaggcattcaaaaawcctgaaatactagttcaggccatgataggaatgggtggtcagaggtgtctcattatatattcctccccttgaaactcaggcacagctgaccagcattaac

SEQ ID NO: 17262 - DNA, 201 bp, Homo sapiens
tgacaaaacagaccatttttgcaataagataccaacatgacagttagcaggccctaaaataaatcaaagtattttaccccaaaatatatttctttgacatrttttgaaatggccctgcaaagctgtctcctgtggggaaaatctacattctgtaaagaatgctgttccctttccaggtctttttcctgatccaggagagaa

SEQ ID NO: 17263 - DNA, 201 bp, Homo sapiens
ctttgggagtctgaggtgggtggattgcttgaggccaagagtttgagaccagcccatgcaacatggcaagaccctgtgtctacaaaaaaaaaaaaaatacmcaaaaattagctgggcatggtgacatgtgtctgtagtcccagctacttgaaaggctgaggtaggaggattacctgagcctgaagaggttgaggctatagt

SEQ ID NO: 17264 - DNA, 201 bp, Homo sapiens
ggtaggaggattacctgagcctgaagaggttgaggctatagtgagccatgattgttccactgtaaagcctggacaacagagctagaccctgtctcaaaaawaaaaaaaagggttgttgcgggggatggatattataaaggatacagatgaatagccagaagaagtacatggggcgaggtccagaagggtctgaagcatgag

SEQ ID NO: 17265 - DNA, 201 bp, Homo sapiens
tcagtgagagtttttatggaggttcattatatagatgtgattgattaaatcattggccattggtgatctatattcagctcctctcccctccctggagattwgggggtaggagtgagaattccaactttctagtcatgtagttggattctctggcaacaggggtcaatgaagaatccccccattagcgtaaacttaggtatg

SEQ ID NO: 17266 - DNA, 201 bp, Homo sapiens
aagcttggtgtgtagtacagcagattctcagtcatttttaatttactctaagggtcaagagttagtaaatatagaagtccatgtgactttggggctttcaytgggcaaaaccacaagttttggcggaaacagataaagataagcacttattcttatttggcatagatagttccttccttctgcatcctactgctattttca

SEQ ID NO: 17267 - DNA, 201 bp, Homo sapiens
ctcactgaaacctatgaaagagacactattttgcagtggagggaactgaggcttggggaagttaagtaatttctcagtcttgtgataaagaaattgcagamccttcaaacatgggtctgactccaaaatctttttttttttttttttgatacaagatctccctctgtcacccaggctggggcataatcttggcttactgca

SEQ ID NO: 17268 - DNA, 201 bp, Homo sapiens
ccaccatgcctagctaatgaaaaaaagattttttttttttaagagggagtcttgctatattgcccatgctggtcttgacctcctggcctcaagtgatcctyatgtcttggcctcccaaagcagtaggattataggcatgagctactgcacctggccattgttttgctttttaaaaaactttcaagaaatgattgggttgac

SEQ ID NO: 17269 - DNA, 201 bp, Homo sapiens
aggttaataaatagaatttttcaagaattaataaccccattctattctgaaacctggaaaacacattaactttattagcttttaagtaacaaatattcctyttttaattctaaactatagtttgcccttttaatccatttaattgaaatagtaacctatagtagaaactattaaaaatcaattatgaaaggtccattaaat

SEQ ID NO: 17270 - DNA, 201 bp, Homo sapiens
cacatggctgaagaggcctcacactcatggtggaaggtgaatgaggagaaaagtcacatcttatatggcggcaggcaagagaacatgtgcaggggaactcycttttataaaaccatcagctcttgtgagacttattcactatcatgagaacagaataggaaagacccacctccatgattcaattacctcccactgggtccc

SEQ ID NO: 17271 - DNA, 201 bp, Homo sapiens
cttatatggcggcaggcaagagaacatgtgcaggggaactcccttttataaaaccatcagctcttgtgagacttattcactatcatgagaacagaataggraagacccacctccatgattcaattacctcccactgggtccctcccatgacatgtgggaattatgggagctacaattcaagatgagatttgggtggggaca

SEQ ID NO: 17272 - DNA, 201 bp, Homo sapiens
tttatttattcatcaattctacaaatatgcaactggtttagttactggaaatacagcaggggtaagacagataatgctcctgttctcatggtgcttatatkccagtggatgaagacagacaataaaaaacaaatacgaaaaacttcagacagtgaccatgtgcaccgaagaaaaaaactgggcaatgtaataggatgtgat

SEQ ID NO: 17273 - DNA, 201 bp, Homo sapiens
agtttgcaacttttggccaagtgctcagaatgcttctttcctgttttctgtatttggaatatagtttatcttttataaaaaaattttgtgggtacatagtmggtagatataccctaaagaaaggaaatgagtatattgaagagatatctgcactgccatgtttgttgtagcatggttcacaatagctaagatttggaatat

SEQ ID NO: 17274 - DNA, 201 bp, Homo sapiens
ttaacacataataattgtacatatttatggagtacagtatgatatttcagtatatatataccatgtgtaatgatcaaattagggtagtcagcatatccatyacttcagacatttagcatttcttagtgttgggaacattcaaaatcctctcatctagctatttgaaaatatacaatttattattcttaactgtagttcccc

SEQ ID NO: 17275 - DNA, 201 bp, Homo sapiens
actgtagttccccttcagtgctacagaactctggaagttactactcctatctagctgtacttttgtatctgctccccaacctctccctatctcctttgccycccaacacttctcagtctctagtaaccactattctactctctaattctatgagatcaacttttttagctttcatatgtgagtaagaacatggagtattta

SEQ ID NO: 17276 - DNA, 201 bp, Homo sapiens
tggaagttactactcctatctagctgtacttttgtatctgctccccaacctctccctatctcctttgccccccaacacttctcagtctctagtaaccactrttctactctctaattctatgagatcaacttttttagctttcatatgtgagtaagaacatggagtatttattggaagcattgttatatccaaagtattctg

SEQ ID NO: 17277 - DNA, 201 bp, Homo sapiens
atctacagatttttttttttttttttttttgagacagagtctcactctgtcactcaggctggagtgcagtgacatgatctaggctcactgcaacctccacktctcagattcaggtgattctcctgcctcagcctcctgagtagctgggataacaggcacctgctatcacacctggctaatttttgtatttttcatagagac

SEQ ID NO: 17278 - DNA, 201 bp, Homo sapiens
catgtttcctgcagagaaagcaagtaggtgccatctagtggcaacaaaggagatccacatttgtgttaactggaatgtatcgattagcagtgattgaaaaygtagttcctgatccagaagcttatgaactctatgacagaacagttgtgatagccataagtcttgaagggtgcattttccatggaatatatggcattgaaa

SEQ ID NO: 17279 - DNA, 201 bp, Homo sapiens
atgatggtttccagcttcatccattctgcccttgtgatagttttctgagaatgatggtttccagctttatctatgtgcctgcaaaggacatgaactcatcrttttatatggctgcatagtattccatcgtgtatatgtgccacattttcttaatccagtctatcattgatggacatttgggttggttccaagtctttgcta

SEQ ID NO: 17280 - DNA, 201 bp, Homo sapiens
tttcaatatggagatacatgttcttcagttctaggaatttttcttttttgataattaattgtcccaatttctttgttctttttatctgtagttcttattarcatgttagaactcctaaatgaatcctttatttcaatctttctcttctataatcatttctttgtctttttgttctactttctgcaagattttatcaacttt

SEQ ID NO: 17281 - DNA, 201 bp, Homo sapiens
gagagttcagtaacttgtttaaggtcctgtagctagtgtcaagactaaactctttcttacttgtacttcattgtcttttaatcatagcacattattaatgkggaaattgataaagacatttttgttggaagtttaattgaactttgaacttgaaaatttaacttgtagacattttactcctgaaaaagggggcttaagtaa

SEQ ID NO: 17282 - DNA, 201 bp, Homo sapiens
gaggactgcaaatgataccattcagtccctgatttctctttcgtcctaccttggttcagcctctttgaaattgtttcttttttaagataaattcttttcamgggtgacaagatggctatagatatcctgtctcacatcctcacaacttccaatctagtagaagaaaagccattggagaatattttatttgtgtgtattatg

SEQ ID NO: 17283 - DNA, 201 bp, Homo sapiens
ttcagcctctttgaaattgtttcttttttaagataaattcttttcaagggtgacaagatggctatagatatcctgtctcacatcctcacaacttccaatcyagtagaagaaaagccattggagaatattttatttgtgtgtattatgaattttataataaatgtaaactaaaaaaattggccaactaataaatcttgtaaa

SEQ ID NO: 17284 - DNA, 201 bp, Homo sapiens
tcagcctctttgaaattgtttcttttttaagataaattcttttcaagggtgacaagatggctatagatatcctgtctcacatcctcacaacttccaatctwgtagaagaaaagccattggagaatattttatttgtgtgtattatgaattttataataaatgtaaactaaaaaaattggccaactaataaatcttgtaaag

SEQ ID NO: 17285 - DNA, 201 bp, Homo sapiens
aattcttttcaagggtgacaagatggctatagatatcctgtctcacatcctcacaacttccaatctagtagaagaaaagccattggagaatattttatttrtgtgtattatgaattttataataaatgtaaactaaaaaaattggccaactaataaatcttgtaaagtgatttcttaaaattggtttaacatattcatgct

SEQ ID NO: 17286 - DNA, 201 bp, Homo sapiens
gaagaaaagccattggagaatattttatttgtgtgtattatgaattttataataaatgtaaactaaaaaaattggccaactaataaatcttgtaaagtgayttcttaaaattggtttaacatattcatgctatattttacccctgttgtgcacatagggaatattaatgggcagtaactacatctcatttctcaggctttt

SEQ ID NO: 17287 - DNA, 201 bp, Homo sapiens
gtcccaagaggagacttttgaaagttttggtaggagtcattactgatgagatagaatttatgtgtgctattttgccattctttttgtgtatgtcctatgtmtttttgtttctctatttctctgctactatctccttttgtgttaaatatttattttctagtatataattttaattccttggtcatttattttacttttttg

SEQ ID NO: 17288 - DNA, 201 bp, Homo sapiens
ctatgtctgtcagtaagggattctcttggtttttgtttatcttggaatgtcttaatttctccttaaattttgaaggataatttttacttaaagtttttttyctttcatcaatttgagtatgtcatcccactaccatctgacctccatggtcaaaattcagctgtcaatctcattgaggatcctttgaacatgattttcttc

SEQ ID NO: 17289 - DNA, 201 bp, Homo sapiens
atcttgttgagtttatcctacttggagtttgttgaccttcttggatgtgtagattaatgctttttaagtcaaatttgataaattttcagccattatttctycaactattctttcttcctctttctctcctcttctctttctgagaatcacattatgtgtatgttggtatgtatgttggtaagatgttttcaccaatctctg

SEQ ID NO: 17290 - DNA, 201 bp, Homo sapiens
taaccaaaccagttgtttcattaatgccattcagtggtgggcctagatcctacattgcttagtgtctcttcaaggtttttcctcctttgtctccataatgrtagttcttctagtgtgttctctgtttcttttgttccacttagaattcaggcttattgacttccagttgtctcaattgtaggtacaaaattgtggctctta

SEQ ID NO: 17291 - DNA, 201 bp, Homo sapiens
tgtgattcagttgagatgaacaaatcagtattaactcctgagtcagtgaaatcaagcctagagccagatatggagccctagggccagaggttctccctaaygtctaatgtcttggcccctcctgggctgagaaaacttaagttcttaagaatcagctgtactcctgaccttaagtaaataagctaactgttttaatttagt

SEQ ID NO: 17292 - DNA, 201 bp, Homo sapiens
ttgttttaagaattaagtgagttgctatttgtaaagcacttagtacagtgtttattaaatagatataaataaataccccagcaagtctaaaaaaagagttrtctctcttttttttttttttttgagatggagtatcgttctgtcgccaggctggagtgcagtggtgcgatctgggctcactgcagcctccgcctcctgggt

SEQ ID NO: 17293 - DNA, 201 bp, Homo sapiens
atgtaaatgtgaaactgccaagcatcttttcaccccttcatgatcttcccatcttatctttgggttactagagttattcctgtggtgtcttggggtaggakagcagagaattgttagagaattcctagctctttatatcttacactttcttctctccttcaaatccttctgtctccatcagttcctttatcctgtgctgcc

SEQ ID NO: 17294 - DNA, 201 bp, Homo sapiens
agggaagtgaaactcaattttgaaagcagaaccatttttacatttaagttgaactgtggttttaaaacatttagctctctattggaaaccattgtgggtgkggtgcatttgtaacagagcttcacctaattcattctatatgcttggcagaggaaaggctgaaatcagagccaaattccaaagagcctctgagggaagcaa

SEQ ID NO: 17295 - DNA, 201 bp, Homo sapiens
ttttgatttgcatttctctgatggccagtgatgatgagcattttttcgtgtgttttttggctgcataaatgtcttcttttgagaactgtctgttcatgtcmttggccccatcaaaaagtgggggtggataagctttttgatttgctgctggatttggtttgccagtatttcattgatgatttttgcatcgatgttcatcag

SEQ ID NO: 17296 - DNA, 201 bp, Homo sapiens
agctgaggatagatggggccacctgagcatgcagtgaacacagagagcacttctgggttgggcagctttaatttctctctaatgataccttctcagttcaytctctgggttcttggttatctctctcccctccgcttcttcttttctccagccctgtccttttttttccttttttttttttttttttttttttgtagtggg

SEQ ID NO: 17297 - DNA, 201 bp, Homo sapiens
cccctaagggcctagcacaatgcctggcacatagcttctcaagacatgtttatcaaacaaataaatcaagaaatgaataccataggaacattatacagaaygacttttcatgtaatcagttacataattcatttgtccttccattttcttctacagagacacttggcatggaagtctcccttaatagaaactttcaggttg

SEQ ID NO: 17298 - DNA, 201 bp, Homo sapiens
aaaactgatgaattttgattctgtcaagataatccatcactctttctgctctaaagcaaagatacaacttttgaaaatttccaacaataaactttcatgcwtggagaatatatttcttttaaatgtgtccctcttttaattgaaatgactcattctgcttgttttggtttatccttttaaacttgaatatcttaggttttc

SEQ ID NO: 17299 - DNA, 201 bp, Homo sapiens
cttggaactgacccaaatgtccatcaatgatagactggattaagaaaatgtggcacatgtacaccatggaatactatgcagccataaaaaggatgagttcwtgtcttttgcagggacatgcatgaagctggaaaccatcattctgagcaaattatcacaaggacagaaaaccaaacaccacgtgttctcactcataggtgg

SEQ ID NO: 17300 - DNA, 201 bp, Homo sapiens
agtaataaccaaactgttcttctcatgttgttttaaaagcttctggtgtatatgcctttttattttttactcatcatacagtctattcagaaaaataaaawaaaaaaaaccttaagtagctcttggcagaaggtcaaaaccagcatttcagggaaggtatttaaaagtcttttaagtgtgggctatttgtataagcaatat

SEQ ID NO: 17301 - DNA, 201 bp, Homo sapiens
cttcctgcctatagctgtgaggagtagcttgacacaaattagctaaaaggaaaaaaaaaaaaaacaaaaaacccctattgcaaatctatcctactttcacrttctcaagaaaaacatacacacatgcacacacatgtgcgcacacacacacacacacactgaaagaaagaaagaaagaaatgcaggggtagtttccctcac

SEQ ID NO: 17302 - DNA, 201 bp, Homo sapiens
ggcagtcagtcaaccatgagatcatgaggtaaacactgatattcttcagcatactgtgttactagatgattttgcccaattgtgcactaatgaaagtgttytgagtgcatttatagtaggctaggcttggtaggttcagcatattaaacgcacttttgacttaaaatattttcaacttatgatggatttattaggacataa

SEQ ID NO: 17303 - DNA, 201 bp, Homo sapiens
gatattatttagcttataattatttgagaaaaaatgtacgtataagcagggatttatttggtattgtcatctcaatatccagaaaaggtcctttcttatgmgtatgtttaaactttttacttctctaagttgaataacgacagtttatcttcagagacctcagtgctggccttggtgtgtgtctgtttaaagtgattgtgg

SEQ ID NO: 17304 - DNA, 201 bp, Homo sapiens
tgctctctgttttacaagtgtggtgtgtttgattccaagtaagcaaatgcctgtattattccaattccttggaattttgataacatttaaaaatgttaatrtttctcaccaaagatattattttattaaccactgtatagcttatttagcacaaagtatccatggagccaataaagtatccatttgttacttgtatccaaa

SEQ ID NO: 17305 - DNA, 201 bp, Homo sapiens
ttgtattaaatgtgataatactagttaggtacttaggtatggtgttgggtgttttacacacattagctcattaattcctctcaacaactctatgaggtagrtacccctattatctcagttttacagatgggaaaactgaggcatggagaggcaaagtaacttgcccagtcacacagatcataaatgatagcaccaggattc

SEQ ID NO: 17306 - DNA, 201 bp, Homo sapiens
atatataaacataaaatacagttttcatttacaactcctcatgtgatgcctcatgtgtaaaaaccttaaatgcttttttcttaagctgcataaataaacaycagtgaaaaacatatgtgatttatgtgtgttcaaacaacaaaacacaaagctagactcctaacctggggaaatgcatttcttcccagatactttctcact

SEQ ID NO: 17307 - DNA, 201 bp, Homo sapiens
tactttcaatatcttttatttaaaaactggtctaattaaaatattttgcaaagcaaaataatcctaattagagttgagtctgctgggactttattacttgcctcgttttgaacatgagccatagataaggtgactatataatttattgttcagtgcaggacatttttgagacttaaagggagtgctatgaatactttcact

SEQ ID NO: 17308 - DNA, 201 bp, Homo sapiens
cctaactgatctatttctagcctggtcaccctcaaattcatctttgccattgctgtcaaagtgatttttctaaaatacagctatgccttttgcctatatcytcaaaattattcaacgactcctcagagccttgaaaataaagttcagatcatttagggttgtatttaggttccctgtctgatctctgaatacttctccagc

SEQ ID NO: 17309 - DNA, 201 bp, Homo sapiens
acattttatagtttgccttagttaaacacaaaatctagcttttcccctgaggttactatttaccctttagctttcttcagtgaaggatatttattccagcytaaactggaaaaatctgagggcctttattgggtatgacatttgccatttttccttttgtggcttccaaagattattccttcaccttctcatagtcttcca

SEQ ID NO: 17310 - DNA, 201 bp, Homo sapiens
aaacattactcccaaaagttaggtgctgtttcttcaaactcttgggagaaaaagtttaagtacaagaagattataaaatttataaaatgagaacaacaaawcacttgggaaaattagaagctatggaaattgttctgatgcctgcaatgcccagattgtggttggatatgatataaaggatttacctgtaaaagtttcctc

SEQ ID NO: 17311 - DNA, 201 bp, Homo sapiens
aagagcaggaagcctggagggtgctggaaaagtgacatttaatgtggaaaaagaaagtaaggaggagatccgaagcccttaggagagtgctactcaagacrctgtgtgcgccagggcatgagggcagccagagggcggtgtgggcacattggatcctggttacctctttcacagcctcacctacaagacctgaataatgta

SEQ ID NO: 17312 - DNA, 201 bp, Homo sapiens
accactccactccactgagactgcttttgtccaggacaaaacagttaatccaatggacaattctgagcctttcatttgacaccaccgttaatcactccttsttgaagagatctgttcctttgcttcaataaccttccactctctcctggttttcctcttttcactctagccacttctcagtctttaggagctcttcatctt

SEQ ID NO: 17313 - DNA, 201 bp, Homo sapiens
atattgaaacatatatatgcatataggtatatatgtgtatatagcaccctatattttatagaatacataattttacgtatacataattttatacatatacrtaattttctgtatgtatataattatggcacatagactatttgagagtaatagtacaatccaacctggtcttggttgggtaggggataaggatcatggatg

SEQ ID NO: 17314 - DNA, 201 bp, Homo sapiens
gcaaaattcaggaatttgcagggaccacagctccagttacccaccaggatattttttagttgccttccttttccatacagcatattcaaaacctcctaatytttactttcctttttcctttgcatttctcctcctgcctcctgttacaaaatttactggtctaagaagcctaggcttcctgaggagacattctcccctcta

SEQ ID NO: 17315 - DNA, 201 bp, Homo sapiens
aaattagctaaaaggaaaaaaaaaaaaaacaaaaaacccctattgcaaatctatcctactttcaccttctcaagaaaaacatacacacatgcacacacatrtgcgcacacacacacacacacactgaaagaaagaaagaaagaaatgcaggggtagtttccctcactcttcactggtgtgttttcttgttttaatgaaatg

SEQ ID NO: 17316 - DNA, 201 bp, Homo sapiens
gctaaaaggaaaaaaaaaaaaaacaaaaaacccctattgcaaatctatcctactttcaccttctcaagaaaaacatacacacatgcacacacatgtgcgcrcacacacacacacacactgaaagaaagaaagaaagaaatgcaggggtagtttccctcactcttcactggtgtgttttcttgttttaatgaaatggctaaa

SEQ ID NO: 17317 - DNA, 201 bp, Homo sapiens
agttacatgaattttctaaaatgcatgttttatcaaaccactctactgctaaaatccctgttacccagcttctaagcatgctgtagagtttccttcatggkctgccatctgtctttatgtccgttctctccttctccttctatgcactggggtgtgcagtcctgctgaacgactaaggttcctagaatgcagcaagccctt

SEQ ID NO: 17318 - DNA, 201 bp, Homo sapiens
tttcttggtttatttactcatctgcagaatggagataataaacattatctcaattccctttgcagagtctaaaaagtgggttttaaatgtctaatatactygtcaataaatgatagtttaaaaaatagtacttaagcaaagatttgcatgtagcaaaacgtgactgagagattgctttcattgcagggattgcaaggacac

SEQ ID NO: 17319 - DNA, 201 bp, Homo sapiens
tctgcatgggcgtgaactcagattgtttgatttgctacccagtggagagccaggtggccataactttattttcttttatatcatatttttatgtgaaaagrcataccattagtacccttaaggaataatcatatcgttttaatccctagtggtacttgggtactgttgggaccttcatcaagcagattccaactacttcaa

SEQ ID NO: 17320 - DNA, 201 bp, Homo sapiens
attttggatctttcctgctttctcctgtgggcatttagtgctataaatttccctgtaaacactgctttaactgtgtcgcagagattctggtacattgtgtstttgctctcattggttgcaaagaacttatttatttctgccttaatttcattatttactcagtggtcattcaggagcaggttgttcagtttccatgtagtt

SEQ ID NO: 17321 - DNA, 201 bp, Homo sapiens
catttcattttctgaaagatttaagtcttttggaccatcttaaagtgatcccaagccacatcttctacatgaaacagggttatatttcttcattcaacacwtatatatatatattttttagcatcttcttcatgtgtaacattgcgttaggggcagaattccaaattgtagatcagccaccttctgggtagctaaaatgca

SEQ ID NO: 17322 - DNA, 201 bp, Homo sapiens
ccaggcactgcaaggagttcagtgtacagcaaaagagagactgcacagtgggggaggattggcaagaagtaatttacgagggcttaagacagtaagggacrtggagaaaatcaaggacaacccccagatttttacttggttggtagtgctattcgcactgtatgttttcattgcagaaaataaacaaggagggacagattc

SEQ ID NO: 17323 - DNA, 201 bp, Homo sapiens
agctgaggtggtggagcaaagttcctctagattactcaccagtgaacaattcaggcccttgcacagagcccactcagctccacacaactctcaccagtcarcttgtctgacatctacacccattacagaggaggagcaaggaggagccgcgtgggtgagggcaggcacactgatgcccgggagaagtggtagtcaatatgc

SEQ ID NO: 17324 - DNA, 201 bp, Homo sapiens
acccattacagaggaggagcaaggaggagccgcgtgggtgagggcaggcacactgatgcccgggagaagtggtagtcaatatgctgataacgaaggagggrcagacatgtcagaaaatgcctccaaaaggaataataatgccaataaaagctcacaacttgtgcagggttaccagacccctctgtaatagcaactgaaggc

SEQ ID NO: 17325 - DNA, 201 bp, Homo sapiens
tgggcagcatagtgggacctcgtctctacagaaaataaacaaagtatccaggcatggtggtggactgccaaatagtcccagctatttgggaggatggggtrggaggattgcttgagcccaggaggtcaacgctgaggtaagctgagatcgtgccactatacttaagcctgggtgacagagcgagaccctgtctcaaaaaat

SEQ ID NO: 17326 - DNA, 201 bp, Homo sapiens
agaaaataaacaaagtatccaggcatggtggtggactgccaaatagtcccagctatttgggaggatggggtgggaggattgcttgagcccaggaggtcaasgctgaggtaagctgagatcgtgccactatacttaagcctgggtgacagagcgagaccctgtctcaaaaaatatatataaataaataaataaaaataaagg

SEQ ID NO: 17327 - DNA, 201 bp, Homo sapiens
agatggaagttaacagtaataccaccttactttctttttccacgttacaatttttagagacatttcccaagggctatcttatttattaatatgtgattcargtacactggggaaggtaagtatactattgttattttacaaaggaaagtacaggtaaaagagagttcagtaacttgtttaaggtcctgtagctagtgtcaa

SEQ ID NO: 17328 - DNA, 201 bp, Homo sapiens
ggatctcttgagcccaggagtttaagaccatcctgggcaacatggtgaaaccccgtctcctcaaaaaatagaaaaaaaaaaaaagccagcgtggtgtcacscacctgtagtcccagctactcgggaggctgaggtggatcacctgagcccaggagatagaggttgcagtgagctgagattgtgccactgcattccagcctg

SEQ ID NO: 17329 - DNA, 201 bp, Homo sapiens
agggcctgagggagacctgtctcaaggtagctgaggatttttctttttcggtatatgtggtggggaggaaaatagctaaaaaatatttacttcatgtaagrctagatttaggggagaatattaaaactcaggaagaggacttttaacataatgaggtggttaaaaggagacaacttctcaatagacaagggaggtattttg

SEQ ID NO: 17330 - DNA, 201 bp, Homo sapiens
caagacaaaaaaaaaatgggctattttggaagtaaagagtttttaattccaggaggtggccctctactgatgtaagcagactgtgatttagtatgtgaagratggatgtaccagactcatttcccagagggaagaggcagttactagattgtttagcctcttcacatgcttgtaatattgttgctttcaaaggtttgctga

SEQ ID NO: 17331 - DNA, 201 bp, Homo sapiens
ggtctccttctgtcacccaggctggagtgcagtggtgtgaacatggctcattgcggcctcgacttcctgggctcaagcgattctcccatctcagcctcccrtatagttgggaccaaaggcacgtgccaccacacctggctaagttttaaattttttgtatagatggagtcttaccatctttcccaggctagtcttgaactc

SEQ ID NO: 17332 - DNA, 201 bp, Homo sapiens
gctcttagagaatgaagtctttaggtagctgatgactttccaagaaacagatgaaaaggttaaagttgtaagtgtttatgttgatatattttccttttcayaacaccctaaaatctagatacaatagtcttcccttatctgaagttttgcactctgctgtttcagttacccatggtcaattgcggtctgaaaagactcaat

SEQ ID NO: 17333 - DNA, 201 bp, Homo sapiens
gggcaagggaggcctttgagcctctttggtaccaggccttagggctacctcttacctaggccaaatgaggatttcatgtggtccagcccatgtttccaggrttggaaagggaatacattgaagtttgcagcaaaacccagctcagtttgtcctttccacatgcatttcttttagaaactctgcaggaaggggtggctaaca

SEQ ID NO: 17334 - DNA, 201 bp, Homo sapiens
gacctcgagaagactcccagagaagatgacatgcagctgagtgttgaagatttagggggatagggatgtgcctagacacgaagtctaagagcacagatgcrcacagagacttacactagaggacaaggctttatttctgctttgtttactgttatatctccagtgtctaaggcttcatttagcttgtagtagacacataat

SEQ ID NO: 17335 - DNA, 201 bp, Homo sapiens
ttggttccagacacctagtggagatgttaagagttgtagagatgtttaagaggttaatgtgattttgagttctagtgtttggctacctctctggtagctcstttctattctctcagttccacttctttcaggtacccattaaatgttggtatttctgagagtccatattaatcacttgtttccactccattcctactcatc

SEQ ID NO: 17336 - DNA, 201 bp, Homo sapiens
atttagttatatgtatttaaatatattcaaaacatcattataaagagagtattgttctttctcttttctgaactccaatgtagtttatcttcccttctttratggttttcatgactatgttttgttcccattaggttccgaactcctggtgtctacccagcatgagtccatgcccacagcatctccctagcacttcttaat

SEQ ID NO: 17337 - DNA, 201 bp, Homo sapiens
ttctcgttatttttgtatatatctaagaatcctttgccaaaaccaaggttataaaactttattctatgttttcttctaggagatttatagctttgatcttmcacttaggtctttgatccattttttaaaattactaatttttaaattttaaatttcattttagatttggggataggtacaggtttgttatattgcataatg

SEQ ID NO: 17338 - DNA, 201 bp, Homo sapiens
ccagagagatgcaggtcagcaattgcttagtgcaatcagcccagggtggagggtctgtgctatgggaccaagccaggggttccctgtctggtgatgagcastggagggtgtgtgggacccatgtgagacagtctggccttcctccttaggtcaactgcagcttgctggaggtgtgaataaggcacttaggatctttgcttc

SEQ ID NO: 17339 - DNA, 201 bp, Homo sapiens
tcccatctcaccctattgttcttaactctcctactgagacctctaacttttacccactgcaggactccctgaggttaattgttttcttctttagatttcctttttttttttttttgattgctagactttccctgtttattttagcaatacagttgagttctgttttatatctgggtcctatgtaattaatatataactaaa

SEQ ID NO: 17340 - DNA, 201 bp, Homo sapiens
atcccactaccatctgacctccatggtcaaaattcagctgtcaatctcattgaggatcctttgaacatgattttcttctctcctgctgctttcaagattcttttttttttttttttgtcttttggcagtttgattatgatatctgtaggtacagatcttgttgagtttatcctacttggagtttgttgaccttcttggatg

SEQ ID NO: 17341 - DNA, 201 bp, Homo sapiens
ccaggcttctgaagagcttggagataattgtctatttgtgtgaactggtgccccaatatattcatggtcttcttcttagtccaatttcaactgctgccccrtagtgcttcagtgtcttagtaattagcagcctcctgtgttctccatgataatgatgttaaacttttagcactctcttcaagcgacctgactcatcacttt

SEQ ID NO: 17342 - DNA, 201 bp, Homo sapiens
tatgtattagtctgttctcacactgctaataaagatatacctgagacttggtaaattacaaagaaaaagaggtttaatggactcatgttctacgtggctgrggaggccttcacaatcatgatagaaggcaaatgaggttcaaagtcacatggtggcaggcaagagagagcatgtgtaggggacctcccctttataaaacca

SEQ ID NO: 17343 - DNA, 201 bp, Homo sapiens
tggagtgcagtggtgtgatcttggctcactgcaacctccatctcctgggttcaagccatttttctgccttagcctcctgagtagctgggactacaggtgcrtgccaccatgcccagttaattttttgtatttttggtagatacgaggtttcgccatgttagccaggatggtctcaatctcttgacctcgtgatctgccccc

SEQ ID NO: 17344 - DNA, 201 bp, Homo sapiens
gatttcttttctttctcctcttccaattaatgtatatttttaatcatcatcactaaagtacctcacgacataagttttatatatgctgtaatatgaatacmtttgccatcatagtgatcacatcatatataggtactacagatatatacaagttttttgaattccaggaacaaatgtgcactgccaatttgattatctcta

SEQ ID NO: 17345 - DNA, 201 bp, Homo sapiens
cttccagaacttgcctttttccccaagtactttccttgacctcttctgcacaatccactgtgagtgcaaggggaagaaataagtaccccctctcagcctgyagtcacatcttccctctctctatatggctatggacgcagtcccagaattctggatttcttgcatgtctgcctttaataagaaagcagagtttaaataggc

SEQ ID NO: 17346 - DNA, 201 bp, Homo sapiens
aaactcctgagattataggtgtgagccaccacgccctaccaacaaaacttttttttttttgcccgacccccagcaacaaaacttttgattccttccttatratagtttctttttaaataacttggacaagaaatgtttgcacagaatctcactgataatgtactttaacttgaagagtatgaaataatcttgagtctacta

SEQ ID NO: 17347 - DNA, 201 bp, Homo sapiens
aggatcactttttgcatgcatgtgtgtgtttgtgtgtgtgtgtgtgtgtgtgtataatgcattttgtatttatacagtattatagtagtatataaactgtwtaatagtacttatacagtttaaccagtgagatggttaaatggttaacaagtaaaccacatagttaaccagtaaagatgtaaaatgacttcagacaaatat

SEQ ID NO: 17348 - DNA, 201 bp, Homo sapiens
gcaaacaatagtcctaggtgaatgttcagggtgctgtggtatttcttctccatgatgttttgcagagatccagaatcctttcatcttgtcacccttagggrcgtagggagttattatagttagattcagcaaagggaaggcaaagcagcatgcaggagcacatgtgggaagttatatggaccaactctaaaagtggcacat

SEQ ID NO: 17349 - DNA, 201 bp, Homo sapiens
acttcctgtattgctgtagtcagttttttccaagtgaaaaagcaaaaacattttctgcatttccagcctgtactctgcacaataggggattcgcagattakcaagaccccattctccagagccttcatttttcatgagggaggccagacatgctcataattaatcattacttacaccagagaagggacagattaattttga

SEQ ID NO: 17350 - DNA, 201 bp, Homo sapiens
actctgcacaataggggattcgcagattagcaagaccccattctccagagccttcatttttcatgagggaggccagacatgctcataattaatcattactyacaccagagaagggacagattaattttgactagtgttgtggagcaagattgggaaagattaatggaggttgttactttcaagtttatcctttcctgtggg

SEQ ID NO: 17351 - DNA, 201 bp, Homo sapiens
gacaaacacaatctgagagaaatgtctccattggatcttcctaaaggtcatgcacatcctcagtattatcctgtggtaaatactatattttatagggtttytttcccttaatgtgcccaatgaatatacagtcatacattgcttaacgatataattatattctaaaagttgtgttatcaggcgctttctttgttgtccaaa

SEQ ID NO: 17352 - DNA, 201 bp, Homo sapiens
aagcaatgctcccacctcagcctcctgagtagctaggactacagggttgcaccaccatgcccagctaatttttttttttttttttttttttttttttttgkagaaacagggtttcaccaggctgattttgaactcctgggctcaagtgttccttctgccttagcctcccaaagtgctgggattacaggcatgagccaatac

SEQ ID NO: 17353 - DNA, 201 bp, Homo sapiens
gcaatgctcccacctcagcctcctgagtagctaggactacagggttgcaccaccatgcccagctaatttttttttttttttttttttttttttttttgtaraaacagggtttcaccaggctgattttgaactcctgggctcaagtgttccttctgccttagcctcccaaagtgctgggattacaggcatgagccaatacac

SEQ ID NO: 17354 - DNA, 201 bp, Homo sapiens
agctaatttttttttttttttttttttttttttttttgtagaaacagggtttcaccaggctgattttgaactcctgggctcaagtgttccttctgccttarcctcccaaagtgctgggattacaggcatgagccaatacacctggcttcaaagtttttttttttttctagagaatcagcagtgtaatagaaattaatattc

SEQ ID NO: 17355 - DNA, 201 bp, Homo sapiens
ttttctagagaatcagcagtgtaatagaaattaatattctagtactcaaaacaacagcaatcataacaataatagcaaaatctatgttcttggctcagttrcactcaagtaatagcttgaccttggattagttgctttatctcaattttatttctgcaaagtagcgtgaggatccctatcctgctcacctcacaagttgtg

SEQ ID NO: 17356 - DNA, 201 bp, Homo sapiens
cacaggagaaggtgtgatatgtcatttaaaaagcccaaacctttcgctttgtattgtcacaaggaactaaaaacaaggcaaataagtgtttcaacttatgytcttagaaattatttcttaaataccacaaactgatttgggtatatcacaaggaaagatcagataattctaatccatgctgaacatgtgattttgaaacag

SEQ ID NO: 17357 - DNA, 201 bp, Homo sapiens
ttcctgctaaaatagattatggtctatagaatctggttatccgctatttaaaatgtttcctacatgtttgagggtttcaaaagtgtccttttcatttgtgraatttaattctattctctagacataatctcagtgttatatcattacagagagtactttagtgaacagtcaaataggaagagagtaaaagaagaacactgg

SEQ ID NO: 17358 - DNA, 201 bp, Homo sapiens
tactttagtgaacagtcaaataggaagagagtaaaagaagaacactggcatgttgagccagactcttaagaaaagcaattaataagaaaatagctctgtarcccaatgagaattaaatagtgagattaatagaaactaaataattggatggtttgggtttggattatgtacatgaagatttttttttttaaagtgaaagaa

SEQ ID NO: 17359 - DNA, 201 bp, Homo sapiens
ttttcactgcttacttacatacattttgaggcatagattaatttcaaaacaagaatttaaagctaggaggaacctcagacatcagcatagtttgtggtttycaaacttttctctccttttctgtttttaaacattagaacactttattcaatcaaaatcttccatgaaatcccattgtataaaataaataaaaccagagct

SEQ ID NO: 17360 - DNA, 201 bp, Homo sapiens
tatttcatgcacagatgaaaggaagcaaaatgtggtggctaagagcatggaccctggagcctgctccctgccaccaggcatatgaccttaagtgtaagtckctctgtgccctactctctacatttttaaacttcgatgataaatacctacttcataacattattggaagaattaaatgactaaatatattggaaatgctta

SEQ ID NO: 17361 - DNA, 201 bp, Homo sapiens
cactggccatcagagaaatgcaaatcaaaaccacaatgagataccatctcacaccagttagaatggcaatcattaaaaagtcaggaaacaacaggtgctgsagaggatgtggagaaataggaacacttttacactgttggtgggactgtaaactagttcaacccttgtggaagtcagtgtcttgattcctcagggatctag

SEQ ID NO: 17362 - DNA, 201 bp, Homo sapiens
caggattacagttggacatcagacatgaacaagattgaggatacaggtactatccggatcttccctcttctttccctgtgctcctctccttgtgtcttttyacttttctctttctctgaagatgagcacttcccttctactggtgaaatcttactaaccatagttgccaatgttattcctcacttatagttcagtcactca

SEQ ID NO: 17363 - DNA, 201 bp, Homo sapiens
gatgacttaagaacatgaatagcttgagtagagcatattttatgaccaaaatgggttcaaacaatcaacctatacttgagttgctactttgtgaaagacaytgttttgggatggaaaaaaaaatatttgcccttaacagaatctagtgtagactagcatagagtgtagtcagaacttacagagtgttgaggtaaagaacat

SEQ ID NO: 17364 - DNA, 201 bp, Homo sapiens
atgaccaaaatgggttcaaacaatcaacctatacttgagttgctactttgtgaaagacattgttttgggatggaaaaaaaaatatttgcccttaacagaawctagtgtagactagcatagagtgtagtcagaacttacagagtgttgaggtaaagaacatgtattctgtggagcctgactccctgggttcacatcgtagtt

SEQ ID NO: 17365 - DNA, 201 bp, Homo sapiens
agcttaatttactttccaaatatgtctgaaactgatcatctgtgcttaattcctacaaccactgactgagtacaagttgtcatcattcatcttctggactrtaacaatagactcataatactttccccatttgtaaccttccaatctgactttcacacagccatagcataattgatatggaattcaaattaaatcacatca

SEQ ID NO: 17366 - DNA, 201 bp, Homo sapiens
agtaccaagataattcaatggaggaaagagtagccttttcaacaaatggtactgggacagcagtatatccatgtgcaaaagaatacattggggcccctacytcacatcatatatacagattaactcaaaatggatcaaagacctaaatgtaagagctaaagctacaaaatttttagaagaaaacacaagtataaatcttgg

SEQ ID NO: 17367 - DNA, 201 bp, Homo sapiens
ttataagtgaaatagtttaaaactgatactaagagcaaaaagtgccaaagaacataggtaatctataaactaaataatcaaattcaagaatggggttataytgcctgaaggcattattgccatgactttctcacttgcaatggagagttaaaaaaaaactctgcttttgatttttctccacttgctgctctgttaccaccc

SEQ ID NO: 17368 - DNA, 201 bp, Homo sapiens
tctcactctttcacccaggctggagtgcagtggcttgatcacagttcactgcagccttgatttcctgagctcaagcaatccttccacctcagcctcccaartaactaggaccacagatgcacaccaacacaccgaactaattaaacaatttttttgtagagatgaggtctcattatatcacccaggttggtctcaaactcc

SEQ ID NO: 17369 - DNA, 201 bp, Homo sapiens
ggaaagaggaaaatgtcattgggatattgagatttacttggtaccttgacagtgaaatctgaataaatggttgttagtgtccttcttagcaatccatttaycatccttttttttctctctgtaatgccagaatataagcttcatgagaatagcaaccttatctctgttcatcgctatgtacccctaagggcctagcacaat

SEQ ID NO: 17370 - DNA, 201 bp, Homo sapiens
cagtgaaatctgaataaatggttgttagtgtccttcttagcaatccatttaccatccttttttttctctctgtaatgccagaatataagcttcatgagaayagcaaccttatctctgttcatcgctatgtacccctaagggcctagcacaatgcctggcacatagcttctcaagacatgtttatcaaacaaataaatcaag

SEQ ID NO: 17371 - DNA, 201 bp, Homo sapiens
ataagcttcatgagaatagcaaccttatctctgttcatcgctatgtacccctaagggcctagcacaatgcctggcacatagcttctcaagacatgtttatmaaacaaataaatcaagaaatgaataccataggaacattatacagaatgacttttcatgtaatcagttacataattcatttgtccttccattttcttctac

SEQ ID NO: 17372 - DNA, 201 bp, Homo sapiens
ccagtgaagagcccctgaaagaaaatactctggagaaaggtcagtgagaatgggccaaagctgaattcttcagatctattcagagaatgtggaaagtctgygccctctgctttctgtgccttccagctggccacgcgctcccatgacatttgtccagttctaccttccccatacctttacatagtaaaggaattcatactg

SEQ ID NO: 17373 - DNA, 201 bp, Homo sapiens
tttacaagtgaaaaaatacattccaaaatagatccaatggaaattagtatttaacttacagactatttggaatataataatagtgaaaacactatacaggmtacaaccaatactatacaaagagaaaaattaatttgaaaatgaattatttgtttaatggaagtcaataaaattaggagattggaaagagagcaactgcaa

SEQ ID NO: 17374 - DNA, 201 bp, Homo sapiens
atttaagtagactgaacaagtgagtataaggcacttgtaggaagctagaagaccaggtgagcatatgcctagacccagttagtaatgagtataattgcatmgaagccgtacacctgcatattaaaattaagcaatctgaatagatggagcaggcagacaaatatcccagaacaaaacccaaaataagtcacttatttagga

SEQ ID NO: 17375 - DNA, 201 bp, Homo sapiens
gatctaatatatgtttaatcatcattctagaggagaataggagaatgactaaaatgtttccagaactgatgaaagtcatgaattctaagatctaggaagamcacagataacatccagacatacattataatgaaattgcagagcaccaaagccaaagagataaccataaaagcatccagagaaaaaatatatcaactacta

SEQ ID NO: 17376 - DNA, 201 bp, Homo sapiens
ccctttaatcctatccacaaacccccatccccacagaaaagctctgttaaagattcttccatcattcagacaaagccattgccagccctcattctatttarcctcttagcaatatctggcactgttaatgactgcctttttcttgaaagcttttttatctaaagtagcctgggatgatgcatgatctttgaaccctcctca

SEQ ID NO: 17377 - DNA, 201 bp, Homo sapiens
tagaccagcattacaaaaattattaaagaagtcctacacatggaagcaaaaggatgataattctaccgtcctaaaaacatgcaaaagtgtgaaactcactyatagagcagatacacaaatgattaagggaaaggaatttaatcttatcatgtcagaacaccaccaaactgcaaagataaataatgagagaggaaaaacaga

SEQ ID NO: 17378 - DNA, 201 bp, Homo sapiens
acctcactaaagtcacaaagcttattagtgacagagccaagatataatacaggtcatctaattccgtagttcatactgttaatcactattccacatttccstcaaaccaaagtggattgagcattcagggtattctgtctaagtcaggcagatatttttatttttatttttatttttatttatttttatttttatttttta

SEQ ID NO: 17379 - DNA, 201 bp, Homo sapiens
agcacagtacctggaatacaatatttgctcaataaatgttcctgggaagtggtagtaggtttatgctgaaatgccattacctggtactgctaaacacaacrgcaaaatctaaaatccaagaatgttttagatcagagagacaaatggaattgtgttgtattcctaatggaggcttatatttctttatatagaagatgtttt

SEQ ID NO: 17380 - DNA, 201 bp, Homo sapiens
tgtaaaataatgatacttaaacaaaaatttacttttttaagcactcaatcacagtgagataatggggtaagggaatgggcaccggacttcaagtcagaagrttatggattcaactgaatgctgtgtgacctagcacaagatacttaaattcttggaacttgtttctgtatctataaaactggaatactaatacatgtttct

SEQ ID NO: 17381 - DNA, 201 bp, Homo sapiens
atatcctttttatgcaaataactacccttttaagcagatatcttctctaaaaatgtcagtctttgtatatctttttgaaggctttcttttaatttgggtcyacctaactacttatgctggacttcaatcctaccctctccaaagattagaatttggaatgcacagagatgcttacctatttattttcataagcaaatacaa

SEQ ID NO: 17382 - DNA, 201 bp, Homo sapiens
gacactggtaataatctagtaaataaatacataatcacaagtagggttacgtgctacgagagacacaaacatgaagtcataggggaaggcagaggaagtcrggaaaactatgggatggtccagaaggactgaggaataacagttaagccaagaacaaaaggatcaagagaagtcagtttcattcctttctctcttggctac

SEQ ID NO: 17383 - DNA, 201 bp, Homo sapiens
gaaaaagaagtttttctgtttttgtttttgttttttttttatagacttcattgctccactcacaagcaagaataagatgtgtaacaagaataagatggaartgagcgttgttgaacacctggataagaagtcaaagagagtagggtcttgagataatctcaccattctacagcttcctataatgttgagttcattaatggt

SEQ ID NO: 17384 - DNA, 201 bp, Homo sapiens
ttccccttattggtcttactccttgtggtctgaccatttttcctgaatgtctgccttttcttatctcattccactgttttactttgattttgcagcttctytccctcaattccttagtgaaaagtacattaggaattgttctttctaaaatcctattttgagctgattgttatcagaaaaacaagtccatttgtgaaaaat

SEQ ID NO: 17385 - DNA, 201 bp, Homo sapiens
tctttctaaaatcctattttgagctgattgttatcagaaaaacaagtccatttgtgaaaaatgtgcttcctttattgtaaaagaaagggctgggattggaytactgcttcttaacctttttatgatggcagcttaattgctgacaacatccagtgctgaactcacttccatgggtaactggtaagagatgtgggtcatgtt

SEQ ID NO: 17386 - DNA, 201 bp, Homo sapiens
gtaaaagaaagggctgggattggactactgcttcttaacctttttatgatggcagcttaattgctgacaacatccagtgctgaactcacttccatgggtamctggtaagagatgtgggtcatgtttcttcacaacatggcagctgtaatcttctttttcccttcaaattagaaagcatattgcattgcaagtgatataatg

SEQ ID NO: 17387 - DNA, 201 bp, Homo sapiens
ctccttccctcccgctctctctctctttctctccttctctctctccctccttctcctgtctgttgaatctgtcagcagcttgcaggctgctctagacttgracagtaattatagcaacttcctgaaagtgaagcccccatgaaaagtctggagaaatgttctttgtcatggcctctacatgagtaattagttccacatgtg

SEQ ID NO: 17388 - DNA, 201 bp, Homo sapiens
atctttcctccattcagcacgaaactttctctgagtattcctcttctctccagcccctattcgtcctgtttcttttttagaacatgaagttggaattgagsttattggtaaaaaaatgtgttaggttatttaataagattttgtttcttctccttaaattttcagtcagatgaattaaaccctaggtgtgcattcttaaaa

SEQ ID NO: 17389 - DNA, 201 bp, Homo sapiens
taaacttagtataatatattgacgtatctgttgcttttgcttgattatcagctttgagattttccttagagaatgcatgatttataagttcaaaaaaacawcattttgggtcaaatcatacacataagggctgctttccaaacatttggcagtaaattctgacctcctgattaatgtcaagtagtttacttaatatatgat

SEQ ID NO: 17390 - DNA, 201 bp, Homo sapiens
gtaagtctaaaattatctcaaaaaagtttttttagaaagtggaaaataaaagatagaacaaaatgacaatctctttcaggggaaaaaaaggtgagagtaasagagtaaagatattttactttaaggaagtaaagatatttctgcatgtttaatatttatacgcatacacaaaatacagcttttatgataccacactgctca

SEQ ID NO: 17391 - DNA, 201 bp, Homo sapiens
tgagccccagcctaccttcccagcattataggttactattatcctgctccagatccctagccaaactgggctcctccctgacctccagcagggatttcccmttctacctcatgaaatctacagcaaccaacgctgcaaggaacatttaaattcttacttccttcaagaagtcttcccggatcacctccaactcaaggtaat

SEQ ID NO: 17392 - DNA, 201 bp, Homo sapiens
gagttgttaaactgtgtcttgataactcatattaccacagtaagattttttttaagtgcaatttcctgcaaagtggagattaattcctgacgctttgaggktttgggttcttcagataaaagactacaaagggaaaacatgaacataccatctccgggagtaattatactctttagcattcatggatgttatgctattttc

SEQ ID NO: 17393 - DNA, 201 bp, Homo sapiens
gggaaagcaagaaagcacacctgccatttcctcactatgggctatcatttctccttgtatgtgttaacacagagaataaaggagaatcctgtatattttarcaaaaggtttagtggtcatagcagggtgaatgctttaaatagggctgagtatgcaattgttctattatcgagacaattgcctgattgagaacagctctct

SEQ ID NO: 17394 - DNA, 201 bp, Homo sapiens
tatcttgctcagttatcatcaccatgcaattttttttataagacagaatccttccctatttctgcaatttgtttggaatgaaattccatattgaggggatwttcctccattgcagatacttttaagaagaagcctctctaccaattctccatcaacctgaatgagctgagtttgggtactctcagagcttgaatgggtcaa

SEQ ID NO: 17395 - DNA, 201 bp, Homo sapiens
tcatgaacaagattgacttactagaaagcatgtttgtaggcatgaacataggttaatattattccatttactggctgagtgatgtcaggctaagctgttawttgatgtgaacatcagtttctaataactaaaaaatggtttgttgtgatatttaaatgaactatccataattttgtttcttttttcttcttttgaagaatt

SEQ ID NO: 17396 - DNA, 201 bp, Homo sapiens
tttggggacatgtaacaataaaaatgctttctttctagttattatgatcatgttattgaataattcattatatatatttttaaatggaattgaatgctgtrtgataaaagtatatgaatagtttttgcattagaaggcagaagaaagtatgtgagttgaatataagaatgagttcctctgagtaaaaagttacatttcgga

SEQ ID NO: 17397 - DNA, 201 bp, Homo sapiens
tttctttctagttattatgatcatgttattgaataattcattatatatatttttaaatggaattgaatgctgtatgataaaagtatatgaatagtttttgyattagaaggcagaagaaagtatgtgagttgaatataagaatgagttcctctgagtaaaaagttacatttcggagaggtatgactgcacctacctatttac

SEQ ID NO: 17398 - DNA, 201 bp, Homo sapiens
ggttagctgtgcattttatccaaacttgttatttacttgtcattttccatttaaaacagttaggtagagtagctgtatactgtctacaactgctgtgcagraagacctcagtgccagcttctccttggtgtagagtgaagagatacaatcatgctttggaaaatgtgttgatatcaaccttagacagaagggttaggctga

SEQ ID NO: 17399 - DNA, 201 bp, Homo sapiens
agtgctaatttctgtactcacaagatagatagaagtaaataggacagtgtcaaaaaaatttctgtaaatagtagttattgagtctttattctcttcattgyagagggaagctgagaaaaggggatgggggattatattccagacacaagaaatctccagtatggaggtttgggagcatcaaagaatgggactggagaacag

SEQ ID NO: 17400 - DNA, 201 bp, Homo sapiens
atagaagtaaataggacagtgtcaaaaaaatttctgtaaatagtagttattgagtctttattctcttcattgcagagggaagctgagaaaaggggatgggrgattatattccagacacaagaaatctccagtatggaggtttgggagcatcaaagaatgggactggagaacagcacctggtgcctgttgagtaagaggtgc

SEQ ID NO: 17401 - DNA, 201 bp, Homo sapiens
ctaattcacagggactacattccaagactccgcatagatgcctaaaaccacagatagtactgaatcctatgcatactatgctttttttccatctgataacygagacagctactaaataactaacaggtggttagcaaagacagcatggatacgtcggacagagggatgattcatatcccaggtgggatgatgggagatttc

SEQ ID NO: 17402 - DNA, 201 bp, Homo sapiens
ttggcatttttaaccattgttggccttttaacctcttttagtaattctatctatcatttgtgctatgcacataaaaagatagtaagctaccattacaggtrgtgaatagctctggaaggggtttgagcaaggaaacaattttatgaggcttgtattttagagagattattctggtagaggtgtgaaggatggattggaagg

SEQ ID NO: 17403 - DNA, 201 bp, Homo sapiens
catattctttgaagctaagtaagtggtatagataataagtacaaataagaaactggaggaaggagattcctccaagaactaatagcaagaaataaaatttygtgaaggagatgggagctaaggtgcacttttggtaaacattttattataacaaatttcacacgatcaaatgttgaaagaattttacattgaatattagta

SEQ ID NO: 17404 - DNA, 201 bp, Homo sapiens
tctatacacattctttataatcccctctcatgttgtttcaggattggtctgtgtaactgtggtaggctaagtaatccctccaaccctcccaagggtgtccrtatttgaatccgtagaacctgtaaatatgttatcttatatggcagaagtgactttgcacacgtgatttgtgaataagttaaggattttgagatggagaga

SEQ ID NO: 17405 - DNA, 201 bp, Homo sapiens
ctttataatcccctctcatgttgtttcaggattggtctgtgtaactgtggtaggctaagtaatccctccaaccctcccaagggtgtccatatttgaatccstagaacctgtaaatatgttatcttatatggcagaagtgactttgcacacgtgatttgtgaataagttaaggattttgagatggagagattattttggatt

SEQ ID NO: 17406 - DNA, 201 bp, Homo sapiens
ctaactgtgtgttataaagcactttggctctgagtggacttatagccaacccaggggaaatgctaacagtgatgtggttttggtatccataagacaaacasaatctgagagaaatgtctccattggatcttcctaaaggtcatgcacatcctcagtattatcctgtggtaaatactatattttatagggtttttttccctt

SEQ ID NO: 17407 - DNA, 201 bp, Homo sapiens
ttcatcagagcaggtgttattacttttttatgtattaaaaaactaaggctctgagaggttaattagattttcgcccatggcgtacatagcagggattagaygactagaaccctaccattagtagataataagctcaggtggtgaaaatcaattagcttcagtaaagcctaattgtatctgtaaatatgttacaaatatcat

SEQ ID NO: 17408 - DNA, 201 bp, Homo sapiens
aattagattttcgcccatggcgtacatagcagggattagacgactagaaccctaccattagtagataataagctcaggtggtgaaaatcaattagcttcartaaagcctaattgtatctgtaaatatgttacaaatatcataccgtgtctctgagttctgagtcaaatttgcagtgtttttgaagcagcattgccttctgt

SEQ ID NO: 17409 - DNA, 201 bp, Homo sapiens
tttcttatataattaagagcttactgctagaatacagtgtgatttaggtaaaacttctcaacatatagcatacttgagggaaaacagaagatcataaaaartttccttcttttattgcaggaatagcatatgatttatttgaagcctaattattttccagaggaatgctctacatgtttccaatagctgttttgtgtttct

SEQ ID NO: 17410 - DNA, 201 bp, Homo sapiens
tctgtagagggttagaggagaagctgccagtttcctcccaatactgatgttgcaaatctcagaactttaatctggaacactctcctctgttatgtatatgyatgaaaatttgccctacctattaccttactttggcatgtggcatttacttgtgaaaaatgtcacaatatctaatagtttatttcctactcatggatataa

SEQ ID NO: 17411 - DNA, 201 bp, Homo sapiens
ggggaacacagctcttccttagctgagctcataatctggactgtgaggcctacacatcagggcagaaagcttctagtttcacttttcatatagtaattttraaagcataagaggctttgcaaaacatcttttaaaataaagatgcttctccaccatctctaagataagttggttctttttggcaaaggtgattttaattgt

SEQ ID NO: 17412 - DNA, 201 bp, Homo sapiens
gggaaataattggactgtatccagatgtgcatgtgtaaaacatcaccacttaactcctcccccatatcctgtctgaagacagggttttttttttttttttygaaaataaactggggttatttgaaagaagttgtggtctctgactaaaactgaataagcaaggccaggctggccataattctgtgtgttcttgtatttttg

SEQ ID NO: 17413 - DNA, 201 bp, Homo sapiens
agatgaagtaataaaacacactttttccctcaaatgcaaatatttcctcaaaaacaagataaccaagtccagcaataaatccaactcatttcaataaaatkttctccacagacttgcttttctcctactctgtttaaggacaaaaataaagatgaaatgaattgcaatgaacctgctcagaggtactcactaaagtggagc

SEQ ID NO: 17414 - DNA, 201 bp, Homo sapiens
ataaagatgaaatgaattgcaatgaacctgctcagaggtactcactaaagtggagcatagagaggccttctgctctgcatgcccctccctctatctgcatwgtcctcagagactgcctgaaaattcaaattctgggcctcattaggcacagagtcctaagattgtgtttctgtttttattcaaagagagaaaacaaaagta

SEQ ID NO: 17415 - DNA, 201 bp, Homo sapiens
atcatgacaactgagtatagtttctatcaaaaaaaatttcttagttcctttaccaagaactggtaaaaaggcaactttttaactaaagggagctaggtacrgaaaggcactgtcctgtcccagacgccaaaagtttagtgggaagtgatggccatagagagggaaaggggatgagaagatcactggtttcagtattaatac

SEQ ID NO: 17416 - DNA, 201 bp, Homo sapiens
cataacaataatagcaaaatctatgttcttggctcagttacactcaagtaatagcttgaccttggattagttgctttatctcaattttatttctgcaaagkagcgtgaggatccctatcctgctcacctcacaagttgtgaagttcattaggtttattgttgcaatgttttctaaatcttctcattaaatgatgttaaaac

SEQ ID NO: 17417 - DNA, 201 bp, Homo sapiens
tctcctgcatgataaaactcatttgcaaggcagaaaggcaaaaatgtgagaagcaagaaaccaatttattgttaatcaataattacaataaaaatgggaayaaggagaaatgtgattttaactcacttcctgggaagacattccagagtttgggggatgacagaacatcttttgggtgcttagggaccaaaagggagtgag

SEQ ID NO: 17418 - DNA, 201 bp, Homo sapiens
aatgctgtcccccccttttgaagatgacatggatttagagcaaagttttggttatttttgagaggtccagaatccaggcatctgcctcttttgatacaaargctgctacttcttgcttcttcaagggacttctcaccctctattgatggtcagccccctctcactgaaggaatcagaatcaattggtgatagaaagttttg

SEQ ID NO: 17419 - DNA, 201 bp, Homo sapiens
cagatgcatggaggtggggttgcgtggcacttgtgcctcctcattttaaggttcttctccatcttgtccctcaaagatggtttgcattgttacaaatgttragaaaatcactttttctcctttcctatttttcttctttctacagaagaaaattcagatcatatgagatttcatgtttctctgaatatcctgttgctcttc

SEQ ID NO: 17420 - DNA, 201 bp, Homo sapiens
ctgggaatccaggtttgcaccaccttgcctggattttcaacaaatgggactggctctctaaccaggaattgaacctgggctgtcatgacgaaagcaccaamtcctaaccactagaccacagggtggagatttcttcttttttaaaaatctgcccctcttgtcactgtttctttttattgctaaataatattccattgtctg

SEQ ID NO: 17421 - DNA, 201 bp, Homo sapiens
tgttagtagaagcatatctaagtatttatgtatttatttttggggtgctaacgtagatgactatattagcccatttttgtgtcactataaagaaatacctsaggctgggtaacttactaagaaaagagatttaatcaattcacagttctgcaggctgtacaagtgtggctccagcatctgcttctggtgagggtctcagga

SEQ ID NO: 17422 - DNA, 201 bp, Homo sapiens
gctgggtaacttactaagaaaagagatttaatcaattcacagttctgcaggctgtacaagtgtggctccagcatctgcttctggtgagggtctcaggaagyttaccaccatggcagaaggtgaaaggggagcaggtgctgtgacatgttgagagagggagcaagaaagagagaagggggaggtccaagactcctttaaaca

SEQ ID NO: 17423 - DNA, 201 bp, Homo sapiens
ccaagactcctttaaacaaccagaactcacatggactaactgagcaagaacttatttatcaccaaaaggatagtgctaacccattcatgagggttccatcmccataatcaaatgacctcccattaggccccacctccaacattgggaatcacatttctttttttttttttttttcactttaagttctagggtacatgtgca

SEQ ID NO: 17424 - DNA, 201 bp, Homo sapiens
tttcaaaatgagatttggagagaagaaacatccaaaccatatcaatgatgttgtatttttaatttcaaatcaaattattcattgctggtatataggaaggygattgacttttgtatattaatcttgaatcttataaccttgctttaattacttgttagttctcaaagactttgggacaattgttcagaatttctacataca

SEQ ID NO: 17425 - DNA, 201 bp, Homo sapiens
tttgtatattaatcttgaatcttataaccttgctttaattacttgttagttctcaaagactttgggacaattgttcagaatttctacatacacaattatgkcaccttcaaacaaagacagttttatttttcctttctgatctgtatttctcttatttccttttcttgacttatggcatcagctagaatttccaatatgata

SEQ ID NO: 17426 - DNA, 201 bp, Homo sapiens
attaatcttgaatcttataaccttgctttaattacttgttagttctcaaagactttgggacaattgttcagaatttctacatacacaattatggcaccttmaaacaaagacagttttatttttcctttctgatctgtatttctcttatttccttttcttgacttatggcatcagctagaatttccaatatgatattgaatg

SEQ ID NO: 17427 - DNA, 201 bp, Homo sapiens
aatcttgaatcttataaccttgctttaattacttgttagttctcaaagactttgggacaattgttcagaatttctacatacacaattatggcaccttcaawcaaagacagttttatttttcctttctgatctgtatttctcttatttccttttcttgacttatggcatcagctagaatttccaatatgatattgaatggga

SEQ ID NO: 17428 - DNA, 201 bp, Homo sapiens
ccaattaacttttcacagtacatgacattaaaatctattgataagtctcctttgcaccttgaatggatcttttacccatgcatgaatttgcagtatcatgygttggtcatttgaagcatattggttccctgaataatatgtaaatcttccaaattttcactcatttcattatacatcaaaaaattacattagtttatatca

SEQ ID NO: 17429 - DNA, 201 bp, Homo sapiens
atattattatgagatagtcttcctatgggccttttatctgggtaccctaaaaagatcttgctgacacccaggagctgttgtttatactttgagaactgctsacctgaagtatcttctctaaacctatttcgtacttggaaaatttgtattcagacctaaagatcaggctcaaatgttatatactttgtgaagcttactgaa

SEQ ID NO: 17430 - DNA, 201 bp, Homo sapiens
ttactgaagctccccagattaatttgtcactactcctctgagtttctgtatattgtagtccctatcacatttctctttgtccatgaggtgctcctgttacrgactgagctttatttctctaccacccacaaatgcctggtagatgctcaggatttcttaaggagcagaagcctgtacccactcattacacattctggcttt

SEQ ID NO: 17431 - DNA, 201 bp, Homo sapiens
gtcaaaaggtcattttaggtaactccaccctaactgaagatgcccttggatctcctagttctcatataattttcatgggaacttaattgaatattttttaragttttatttcttatttttgttctagaaacatttgtttagcatttaccatgtgtcaggtgctcagcattcaaaggtaggcaggacatgaactctgctttc

SEQ ID NO: 17432 - DNA, 201 bp, Homo sapiens
gtgtttaaaacagtgttgagtttgtttttggaaatctgagtttcagagtaaggcttctagaatttaaaaaatcaccttaatatattatttacaaaaatatrtcatagtatctcagcattgatttttcaactttatattagcttcatgctttttagagaatacaaagaaagtgtgtacttctttaagtgtaatatttctttt

SEQ ID NO: 17433 - DNA, 201 bp, Homo sapiens
acatcagcatgtcctttaaggtataaattgtgttggtttctatacttagatttcattcctagcgatagcaaaagccaagtgtgagggaagagtttagagayaaacatgatagagaaggaaataaagggcattttttacatccagcgatttcagccatccttccctccctcaaaacaaaaattctgacaaatttaagaaatt

SEQ ID NO: 17434 - DNA, 201 bp, Homo sapiens
aagcaaagtagcattattgcttaacaaataccttgactaactaattaaggcttcagaaaaagaagacagagagcgagatttttctgattatcatcactccrtaattactagtattttccataacctaggtaactcagctgtctaagaaacaaaatccagctgaaactgaaccgtctaaagttttccttctacaatttttta

SEQ ID NO: 17435 - DNA, 201 bp, Homo sapiens
gatttttctgattatcatcactccgtaattactagtattttccataacctaggtaactcagctgtctaagaaacaaaatccagctgaaactgaaccgtctraagttttccttctacaattttttaaggcccagcgcaggatccctgtcatgctaaagtctctcctggatgtctggaaaaagtcttatagtctgggagacat

SEQ ID NO: 17436 - DNA, 201 bp, Homo sapiens
ttatgaggatgaaggagggttggagggtttgttgtaatgcttttacataatcaagatcaaattgttcaagctctttaatgttatctatttgttgtatttarcaaaggaatgaatttgtagctaataggcagtaatttggtttttattcacctaatagaaatattgtagcagagctgtcaccaggcttgttgtaatgtcaaa

SEQ ID NO: 17437 - DNA, 201 bp, Homo sapiens
cttaaaaataaaagctattatatgcttcttacatctttagacaatgggaattattctaaattacagctgacagaaagcattttttctattcttcatttgamtttgtgttgtatatctaaggacttgagaaattgatttcaaaatttcatggtaacttgtcataatccttatggaggaaaataaaacatagaagttggtctg

SEQ ID NO: 17438 - DNA, 201 bp, Homo sapiens
agtaaaagtataagcatataatatagtgttatggatcagaatatctaaagagaaattaaaagaaatttctctttgaagtagaggtaaagagggttggagcsggagacttgcttctcatcacaccttcttcaaaactatgaactgttatcatgtgcatgcattattaatactttagttttaaaaattaaattaattatttca

SEQ ID NO: 17439 - DNA, 201 bp, Homo sapiens
atggatcagaatatctaaagagaaattaaaagaaatttctctttgaagtagaggtaaagagggttggagcgggagacttgcttctcatcacaccttcttcmaaactatgaactgttatcatgtgcatgcattattaatactttagttttaaaaattaaattaattatttcaacaaacttgccttgagtttatgtaatgtgt

SEQ ID NO: 17440 - DNA, 201 bp, Homo sapiens
aggaaatggagatcgcattaccaaataagatgggaagggaaagcagtgtgtttaagtagaactagacagaatgaccaggtggaatttggatttgaagtttkaggggatatcatgttaaagcagtaaacaccaagctatcacaatctgacccgttgagattccattaattgataacgatgatgagtacttctttatttgtta

SEQ ID NO: 17441 - DNA, 201 bp, Homo sapiens
actcttctattctccaaccaccttagtccaagaaaccactgtcttcttccttgattattgtaagagcttcgtacttgttctgtctacttctggccattctrtaagtcttctctaagtgtagctctcatcaatcacttccttgatattcccactgccacggtcccattgtgtcactttgtctgggccattggagtagccaac

SEQ ID NO: 17442 - DNA, 201 bp, Homo sapiens
aactgggttttttcaattgaacaaaattgtggatgtgataacacacccatgaaatttcactaaatcataactctgtcttcctcatctcagcatttaataawttaaattattcaattgattttgagaatttgactaaagctatggactctccctacctccttacaatatgtatgttttgtaaaagtttgcatatttttgtag

SEQ ID NO: 17443 - DNA, 201 bp, Homo sapiens
taataaattaaattattcaattgattttgagaatttgactaaagctatggactctccctacctccttacaatatgtatgttttgtaaaagtttgcatattkttgtaggggattgattgttttgctgaacacttggtgctctattgatttcaggaaagaatcctttgtttaactacttcatgcccaatataggacacatgct

SEQ ID NO: 17444 - DNA, 201 bp, Homo sapiens
aggacacatgctatttgaaaatgagaaaaaataaatatagtaacagtgttttaacaaaattagaatgttccttcaaatgaatgttattttcttacttaccrtttctttttttattacagcttgaatgttaaatgtttcatgggtgtatagtacttcctctgtttactcattctctttgaccctcttcagcccattgcgagc

SEQ ID NO: 17445 - DNA, 201 bp, Homo sapiens
tcccctttgactagtttgcccttcctctctcttacctctaaatgttgaaatgacatagatcttctcctcttttctgtcctcatacatcctctctagctgarctcatctaggagttcagctcctagatgagttcatctcatttaaataccatcaatatgccatatttatgtgactaccatagttatgtctccaactctgaac

SEQ ID NO: 17446 - DNA, 201 bp, Homo sapiens
cctcaggactttttggcatagtaataacattgcaaagttgctcacatttttcatacccttccattttatcttgtgtgtgtgtgtgtgtgtgtgtgtgtgtktgtgtgtcttgtatgtggaatattcttacagctagtgacttaatatgctgatgaacacagagagctggattttttttgcaaaccaatatttttgtgccat

SEQ ID NO: 17447 - DNA, 201 bp, Homo sapiens
agtggcagttgacttggagtttcagcccttcctcaggactttttggcatagtaataacattgcaaagttgctcacatttttcatacccttccattttatcktgtgtgtgtgtgtgtgtgtgtgtgtgtgtttgtgtgtcttgtatgtggaatattcttacagctagtgacttaatatgctgatgaacacagagagctggat

SEQ ID NO: 17448 - DNA, 201 bp, Homo sapiens
tccaataatcacttattattgtacaatattggaaataagttgtcttggtgtgagttcatattaaagtgtttttttttgttttctttttttttggtgtttcyttttttttttttttttttttttttttgaggcagggtctcactctgtcacccaggctagaatgcagtggcaaaatcacgtctcactgaagccttgaccttc

SEQ ID NO: 17449 - DNA, 201 bp, Homo sapiens
caaatgctaacacccagagtgtctgactttgatgtgctgccaagcacctttggcctccagtgggtgctgactgaattggagagattccagattcagcaaakatgtctgttagcagaggaacaggattaatgaagggatttgtccctctcttacctcagtttacttaaggagagggttttattaattggcgtgaaaacgttg

SEQ ID NO: 17450 - DNA, 201 bp, Homo sapiens
gattcagcaaagatgtctgttagcagaggaacaggattaatgaagggatttgtccctctcttacctcagtttacttaaggagagggttttattaattggcrtgaaaacgttgcataacattttaggaactaaatcctagaatttcttttaaaatagtacatttacaataattatcaaagattttttctttaaaattatttt

SEQ ID NO: 17451 - DNA, 201 bp, Homo sapiens
caattcacactataccattactattccactaggatgaattaaaatggaaataactttattaatttaaaaaagctgtcttttaattgaaaaagtgatatgtrcatgtaatacaaattcagacattccaaaatacattatatttataccacataaatccctttcccctattgaggtttcttagtaagatgtttcatttacctg

SEQ ID NO: 17452 - DNA, 201 bp, Homo sapiens
cagccatattttacagatttgtagtgatatcaagtgctgagaactaggataagaggaaaattcgaagagaaaaactacaagtatatccgcctttattctcygaaccatttctcattatttagagtatgatgaatgaatcaaacaatgatcttgggtatagttcttcagatatctgttctcaaacagtgtgggatctaccaa

SEQ ID NO: 17453 - DNA, 201 bp, Homo sapiens
tatagttcttcagatatctgttctcaaacagtgtgggatctaccaattagaatgctaattgggaactaaaaataatattcatagtaaatctgctttctggytttattttaagacttggctttttaaagttttctccatccttgtttggaagtactcattctgtgaatttatatagaagtagcatttctggccaagcagaaa

SEQ ID NO: 17454 - DNA, 201 bp, Homo sapiens
tttcctagaaaactaccagatgccttcctagagataaagcataaccgagtttatttaaaattgagttggtgacttccttgtgtaaaactgactttaaaatrtgcatttaacaaaccatatttcaaagttctaactagctacttactccctgactcactgaatgaaaaagtattcatataaagttttaggtgtcagttgaat

SEQ ID NO: 17455 - DNA, 201 bp, Homo sapiens
taaagacctctgaggtctgttctggcttccttctgtagactcttctctgtctcattctgatctctctttaatgtttacagttctgtgatgttttgtgctaytctggtcttccatgtcttcgtatatctgattttctgtggaatgcctcctacctcatatttcttctcagatattgtttctggcagctcctccaagcaggat

SEQ ID NO: 17456 - DNA, 201 bp, Homo sapiens
atgtggcatccagagggaagcactctctctgactgaaaatctgtacagttcaaccacaaataaggcatttgggcaatataacagaatcaatttaataacastgagtcttcaggttactttttgaaggtacattttgcaggaaaaatggcatacatattttctttttatatagatatattagaaaataaatttaaaaatatg

SEQ ID NO: 17457 - DNA, 201 bp, Homo sapiens
aagagcttaggcaaggttagacctggggatgtggtggcacctgggtccggaggtgtgggatgtcaggacactcagggactattcaaaaccatgtggatacygagtgtccaatgcagtgactttgtcataaccctagaaagtcttataaagagattggcaggctcaggacagatactatgtgggaaactaaaatgatgagta

SEQ ID NO: 17458 - DNA, 201 bp, Homo sapiens
tattcattcatctcttcattaatggattttgaatgcctgcagtgtgctgcacaacagagaggttgccagtttgtgtcttgcagaccatgtttcagttgttktcctgttactctcatcttggctaatatttaaagagacctgagtttttctttttaacctctgcataattaaaacactggatgggattgtttccctcagtta

SEQ ID NO: 17459 - DNA, 201 bp, Homo sapiens
ggatctgatactctttttctgcttggagtctggacctcagttactgctctctgagatactggcacagagttaagcctattccaaggaaccatatgttaagkcctagttataagttgctgaaatgaaagttgtagagatatacagcaaacttttatgtaaggaaataagcatatgcaaaactaatacatgtatttaaactaa

SEQ ID NO: 17460 - DNA, 201 bp, Homo sapiens
gcattggctaaatgaactgcttaatggtaggaaagctatgcaccactgtactttagaaaatttgataaatgtgcacttataaaagataatacatttcatcrtttcaaagagaatatgattccctaaaatatagttattttaacttttatggttacacaaaacaatgataaatcaactcacttttttccaatatattaagtg

SEQ ID NO: 17461 - DNA, 201 bp, Homo sapiens
ataactccttattcagaaactctttttgatattttcagtttctaaacttagctgattatcaagaggaagcaaaaaagagccttgagtacccaactgatatyacaaagtctttgatgtaaatctcatgcattacagggtcccagccttattctggcctttccagccttattttaaactcagaccatgcatactgggttattg

SEQ ID NO: 17462 - DNA, 201 bp, Homo sapiens
ggccttggtcttgtccaccagcactattccagttacctggggccccttaaccttcacctcttggctaagccttatccaggctttagaagcagaagaaaacwgtaaaggctattgttcagcagtaaatttcaagatggcattaatattaatctctcttgaccctgaatactgttcaactggcttcggctttgtatcttgaca

SEQ ID NO: 17463 - DNA, 201 bp, Homo sapiens
ctgtgagtttttataccacttgaaggcaatgtataagactggcagatagcatatgcatttctcatttggtgttttaattataaccccctagttacagataygacagctttctgagcaaactgttaggcatgcaaatcagtgcctttcaaattatgttaaagtgatcatttggcatagcacaatcatatcataaaaatagag

SEQ ID NO: 17464 - DNA, 201 bp, Homo sapiens
tttgtttatttatttattggcaccccagatgggacaggaaccattcagctatttacagtcgtgctcatatacactaacaattcagtcactccctttgttartttattaatttgttgcttaaaagacatttatcaggcatctgttgagccagcaaaatgctcctggtcagtagtgtaagttcaatgtgctgtatcacctggt

SEQ ID NO: 17465 - DNA, 201 bp, Homo sapiens
tattaatttgttgcttaaaagacatttatcaggcatctgttgagccagcaaaatgctcctggtcagtagtgtaagttcaatgtgctgtatcacctggtagkacactagactagcaggtgctcagtacgtgtttctgattatcttcttgtttctccaccattctaaaaaataggctattggtttacatggcatcttgtgtgt

SEQ ID NO: 17466 - DNA, 201 bp, Homo sapiens
gcagcctttctcacaaatattcttgtaagttatgctttaactgttacatacaaacttaatcaggcaatcaatcaatcaagtagatttctgattcttagctyctggaaagtatcaatagctgtcacaatatgtgacattatacctgaaccatttaggcaaaacaactgagaagaaattttagaaaataaaaaattatgttat

SEQ ID NO: 17467 - DNA, 201 bp, Homo sapiens
cttgcaaaaactcttcaagttacagagaaagctatttctgtttaggccctaggtcattatcttaatatccaactaaaactattctgcttgcaaataccggrtcttgcctctgtgactttattggactcagattacagaacttttcacagctagattcttgatttgcagagggctgattcagctccttctttatggccctat

SEQ ID NO: 17468 - DNA, 201 bp, Homo sapiens
aaggcaaattgactgaaacatagggtacgtgaaaggtgaggagaaaaataactgtgaagaaagattagagtcaaacagtggaaaaattttaatattgtackaaacagtttggatttgattctgtacctcgttcagagaaattaccattataatgtagtatgattactacagttagaaatagaggtgagcatggggtgctaa

SEQ ID NO: 17469 - DNA, 201 bp, Homo sapiens
agcagcctcctgtgttctccatgataatgatgttaaacttttagcactctcttcaagcgacctgactcatcactttcatcctcactttcaatgaaggtttygcagaaaaaataggggccataaatgggcactatgaaacattgattcttgccttctatccctcaaacttacctgtattcacagccacacccccttcttatc

SEQ ID NO: 17470 - DNA, 201 bp, Homo sapiens
ttcactcaaggttggactttttgtttttgtttttctactctccttgtttcttaggtgaggacttttttgtttttattccttagcatttcataaataacackagagttctcttcatttctctgtttaaaagtttttccatcttatacctcaccacttctcctgctatttgttgaaaatatttgaggtttctggattaaggat

SEQ ID NO: 17471 - DNA, 201 bp, Homo sapiens
atgtgatccatactgaaattaaatttttatattgaggttccaccaaaataattaatcagtaccctaaataacacttacaacattggaccttattaaaacaygttttgctgctttctctcagaacatgtataattaaaatattctccttgaattaaatattgaaggttttgattcctaaagtcgtgtatattatattatttc

SEQ ID NO: 17472 - DNA, 201 bp, Homo sapiens
tactgaaattaaatttttatattgaggttccaccaaaataattaatcagtaccctaaataacacttacaacattggaccttattaaaacatgttttgctgytttctctcagaacatgtataattaaaatattctccttgaattaaatattgaaggttttgattcctaaagtcgtgtatattatattatttctccattgaat

SEQ ID NO: 17473 - DNA, 201 bp, Homo sapiens
tttgaatgagatcatgaaataatctcattatgagattaaatgagataatgaaatgagtggtagaaagcctaatcagaaatcaattgaaatgtcagtaggaytttattttttaacctctgtatgtatgtatcttaagaattgggactatttatatgtttgggactatttatatatatttatatattttatatttgaaagcca

SEQ ID NO: 17474 - DNA, 201 bp, Homo sapiens
tttatatattttatatttgaaagccagcagttaaaaccaagattttgactcttatactcccacaatcagttcaatatcaaccagctagtaaccaaaccagwtgtttcattaatgccattcagtggtgggcctagatcctacattgcttagtgtctcttcaaggtttttcctcctttgtctccataatggtagttcttctag

SEQ ID NO: 17475 - DNA, 201 bp, Homo sapiens
tcaggcttattgacttccagttgtctcaattgtaggtacaaaattgtggctcttacagattccttttctggtagaattaagcccatgggcagtaagcttgraaagatcaggagacacacacgtgcacacaaatcaatgctcctgccaaggccagtagattggaggcattcttagatgtctctacttcatgggatattcttg

SEQ ID NO: 17476 - DNA, 201 bp, Homo sapiens
aagtgcctgtcaaagctggtagtggtcacctctaatatggacttgtgtggcatagcagaaacatgcctggttttggtagtgtggacatgtcattttggatrgatctcgcatttgaattctggactctgctgcctgggaccatgtggtacttttaaagtatccagttagacagagtgacccatatcctcaggcctccgcgcc

SEQ ID NO: 17477 - DNA, 201 bp, Homo sapiens
cacatacactcacatttgattactagatgtaccattttactttatgatgtagttataatgacttaagtatgattgtcactggaatattttttagctgctartatcattatctctaaatgtgatattttgccccaagactcagagataaatgtcctttccatttgtatgtcgacttggaattgacatggggtgacgtggagt

SEQ ID NO: 17478 - DNA, 201 bp, Homo sapiens
ctgctcttcttcatttgttccatgacacaatttgctttctgagttactaggatttatgcagtccaatggttaaagagaaagagggactatagatatgtgcygttagagtgatatctctatacaccgcaagcagcagaccaaggtctgtttgtttttcaatctgctcagtaggtctcaacacctgttttctcacagttgaaa

SEQ ID NO: 17479 - DNA, 201 bp, Homo sapiens
cttagtttatttttccctaatgcataattatattctattgtaataatgtttctagttcctaatcttacatgagaatgttctctctcttgtggaatcaaaayttaggtattggagtataaaaagatcctttttttgacttatatgcaaatttaggaattaaatgcttggttgcttactgagattgttgtcaagtagaaatac

SEQ ID NO: 17480 - DNA, 201 bp, Homo sapiens
acatgcctatgatatgcttcttcaaattatttaggtttcctagtacagatgatcattgatagtctggttgtaaataaccctggcatcaaaacagaattccrtacgtatttcttaagatactaccataaaccctctgctaggtaatgtcagtgatgagagaggtagaaataccaagattgatgctcttgactatcaaggagc

SEQ ID NO: 17481 - DNA, 201 bp, Homo sapiens
catcccatcactttaaacagttgactgagagctttagtctcccttttctctattttagaccatttcattgatctccaaaacagcttccataaactattaarcaatctgtaagaatactgagtattgctgatcttcccagaataaccaaaatgagttgtgtttcttatattgatacgtgtttattcatggatccaccaaaag

SEQ ID NO: 17482 - DNA, 201 bp, Homo sapiens
agatgttaattcctaagaagatctgatcttttgagtttttgtgttttgggctgaccagctgtctctgactaatagcgctctgcagagattgtattaactcracagtttgctgtgtcttttatgttttatgtgataatgaatatttgcattgttatttcttttcaagtcaaaacaatgatggtgttatagtttttaaaaaac

SEQ ID NO: 17483 - DNA, 201 bp, Homo sapiens
caagtaaacttttaaataaaagataaatcctctcacatcagatcaggttttgctgccaaatttgctaagaaaaaagctttcaatttgcaagcaagggattwtgaactagaatatattattttccagaatcaaatccaataatgtatacatgatacaatatattttaaaggatcttcagtagttcttcctacttagcagaaa

SEQ ID NO: 17484 - DNA, 201 bp, Homo sapiens
agctggactgctcaaaaatttaaatttaaccttcattcatccttccactcatgtattcaaaacctatctgtgtcaaaatgtgtggtgggtgtttagagaakcatgatgatgcatcaatcacaggcctcaccctcaggaagcccacagctcagcggggatgatggtaagtaagcaaactgaagtccacttccttttccaagg

SEQ ID NO: 17485 - DNA, 201 bp, Homo sapiens
gctcagcggggatgatggtaagtaagcaaactgaagtccacttccttttccaaggctagctactgctgacccttcaggtcttactgaaacatcacttctgyaagaggccagccttggtcaccagatttaaagtcaccctcccttcccaatgtctttcactatctattacattttattatttgaaacaatcttatttattca

SEQ ID NO: 17486 - DNA, 201 bp, Homo sapiens
taaagctatttttatgttgcttaaagcagtacagaattatagtaaggttttaagcacaatcatattaacatttgtggagaaaggctttgaaggtgagacamgactggaaaaaggagattagttagaaggctgttgtggatgaaaaattgtggtgatccgggcttgggtgtttgtactgaatttgaggaaaagctgatgaat

SEQ ID NO: 17487 - DNA, 201 bp, Homo sapiens
caagtaagatggtgctgctcttcacagagaaaggagcatagtgaaaaagtcagattgggatccagagtcatgaaagttagctttctgagtatgagtcaccrtgggagtttgaagtaaaaatgtccagtaggaaggtggataaaagtgtttaagtccagaagtgacagagaactctttcttccaaaggtattggagactcat

SEQ ID NO: 17488 - DNA, 201 bp, Homo sapiens
gttgtgaagtgtgttctcttgcttggtaagaagaaagacaactgggtcatacataagagattgtggcactgaacaggggagttggtaagccactcctcggkacctcaagactaaagtgcacagggctaaccaaactgacaggaaagtatgtttgtggtttgcacaaggtgaaagccccagttacccacagctatgtgctta

SEQ ID NO: 17489 - DNA, 201 bp, Homo sapiens
tgctttcaaaccagtcacagctggctgctcctgcaagtgcccatctctcatcagagatgctgaagctcctctctgagtccctcaatcctcccctctgtccrgagattaaagacaaaggcctggcacagaagggagcctttggtaccctgctttagcactgtgaccccatcacctttggggattggtcaggctgatgtcata

SEQ ID NO: 17490 - DNA, 201 bp, Homo sapiens
ctcctacaaggaagacctgtttattacaaacatggatttgtcagttaaatagaagtacaatctcattttcctcacctatcggggaggaaaatgttccttcyctcacagaattattatgtggattaaaagaaataatgtgtgtgaagctcttagcatagtgcttggcaccgagtaatatttagtaaatgttagccattgtta

SEQ ID NO: 17491 - DNA, 201 bp, Homo sapiens
gccctggcccagagcacggaatggcactgatggcagctgatctaacccttccttcctaggcctggctctgacaggttaatactagaacctatagagtgcaytgtggtatgtacagacctcagctaccttatagtataaaattaggaaatctagttcacctctcgaggcctgccaggcctgtaaatgggaagactcttttcc

SEQ ID NO: 17492 - DNA, 201 bp, Homo sapiens
tttccctatagttaaatccctgtctcaggcatgccttagaaacgagtctgctagccaaattcaaggacaagtaacctgtatcctgaggatgcctgtgctcrcaaaggtagatctttcctaaccaactgggtgactggactgtccattgccttcgaggagcccatgcagctccccagcatttggccaggtaggctccaaggt

SEQ ID NO: 17493 - DNA, 201 bp, Homo sapiens
aaccatttaagtgctagaaatcgataccattaaaatgtgagggagcacagatagaaattaaactatgtcttgaaatttttaatagccctggtctgacctgrtaatcttttggtacttataatgcggcatgcaaacattagataaggatactctgtgatagcaaaactatgtacaggtgagattctcaatttcatgtggcca

SEQ ID NO: 17494 - DNA, 201 bp, Homo sapiens
ggctgggtagtagctggtggtgagggtgcggagcacttaagttcaaggtagcaaaattatgggctacacacagctatgattgagtcactagcttctgttastcattcagaactctcaagaaacaagacaggaagttctcatcattaagatcatcattgagactgaaagctggccttcgtgaatttaagcaggtataatgac

SEQ ID NO: 17495 - DNA, 201 bp, Homo sapiens
caagttaaagggattagaaaattgttgctggccttttcaggcagattttaagtgagagcatactagcagtgtagtctgctgcctgcttacaccctcaaaasctgacaagcatcatctgaatgctatgtgctatgagctcccgttgaattccatgttacaatcagactttaaaatgagggctggttcccttggacaagagaa

SEQ ID NO: 17496 - DNA, 201 bp, Homo sapiens
aattaaaccctaggtgtgcattcttaaaaacaaatagctcccaaactaattgctttgatacttccatgtggcctttaaagtaatttttctatgagccagtwgcttttgaattttttaaacattaagtgtcttcagaagggtggagaaagaaggatggagttacagattgatcatatttttatttaaaagcagttttctaag

SEQ ID NO: 17497 - DNA, 201 bp, Homo sapiens
aaaagcagttttctaaggttccaaagaatattgcataccaaatatttccaaataacatatatagaccttatcgtctgttccattcattcgttcattcattygttgcttgtgacctgctgattcttcttaaactgtcgtttcacttattctgacatttatatcttatctttctaacttgattagaagcatcttgaggtccag

SEQ ID NO: 17498 - DNA, 201 bp, Homo sapiens
tattgcataccaaatatttccaaataacatatatagaccttatcgtctgttccattcattcgttcattcattcgttgcttgtgacctgctgattcttcttraactgtcgtttcacttattctgacatttatatcttatctttctaacttgattagaagcatcttgaggtccagggccatgcctgtagtttctaggtatgct

SEQ ID NO: 17499 - DNA, 201 bp, Homo sapiens
ggccatttttggagcatttgagagtgtgtttagaagtgccacaaaatgctacagatgccatctgacttaaaattcactcacggagtagtttatttagatgygtgtttgctgggaatctactaccaggagaaatgtggaaaccacatgaaattcactacataaagaaatctggtttccatttctgtactgcattttgtgcta

SEQ ID NO: 17500 - DNA, 201 bp, Homo sapiens
agtttaaatatgttatgagattgccatttaaagaggaacacactcagttaagataaaatgtattgtgattaataaaaatgttaatatttgaaacataaagrccaaccatacaattgtgattttcctttaataaacatgaccaaatcatacatacctatgtttaggagtaataaacatgcatttctcaacttggtaggcctt

SEQ ID NO: 17501 - DNA, 201 bp, Homo sapiens
taggaacttgaagtagagagacttcgagttgttaaactgtgtcttgataactcatattaccacagtaagattttttttaagtgcaatttcctgcaaagtgragattaattcctgacgctttgaggttttgggttcttcagataaaagactacaaagggaaaacatgaacataccatctccgggagtaattatactctttag

SEQ ID NO: 17502 - DNA, 201 bp, Homo sapiens
gaagaaagtatgtgagttgaatataagaatgagttcctctgagtaaaaagttacatttcggagaggtatgactgcacctacctatttactacagaaaatakgttagctgtgcattttatccaaacttgttatttacttgtcattttccatttaaaacagttaggtagagtagctgtatactgtctacaactgctgtgcaga

SEQ ID NO: 17503 - DNA, 201 bp, Homo sapiens
ccaagccaggacaatagtatttaaaagccaaatacctaagaggaataccaaactagaaatccataactctggaatgccaaacttgaaattatgatgagttrctggtgataccatagtagtatgttaataagaaaatagtatgttaataatagtatgtcataatagtatgttaataagaaaaactagctctgttgatttcat

SEQ ID NO: 17504 - DNA, 201 bp, Homo sapiens
caggacaatagtatttaaaagccaaatacctaagaggaataccaaactagaaatccataactctggaatgccaaacttgaaattatgatgagttactggtrataccatagtagtatgttaataagaaaatagtatgttaataatagtatgtcataatagtatgttaataagaaaaactagctctgttgatttcattgacta

SEQ ID NO: 17505 - DNA, 201 bp, Homo sapiens
tcactccgtaattactagtattttccataacctaggtaactcagctgtctaagaaacaaaatccagctgaaactgaaccgtctaaagttttccttctacamttttttaaggcccagcgcaggatccctgtcatgctaaagtctctcctggatgtctggaaaaagtcttatagtctgggagacattccaaaatatgtgcagt

SEQ ID NO: 17506 - DNA, 201 bp, Homo sapiens
taaaaaaaaagaaaaaaaagtttggatacatatacatacatatgtacatatatacacatacacacacctcatcccccccacacacaaataattggcatacrgtgaatatattttaccactaaagctgtactaaacataattagatatgtttgggataagtcagaagtattttcgaatcttacagtaacttaattattatat

SEQ ID NO: 17507 - DNA, 201 bp, Homo sapiens
agaatgatttttgaatgcataagaacccaaagaggatgacataaacttagcgaagttttcaagctccagtctttattatgtatgtatgttttaaattaagragcaatccaaaggttgaaaatcagggaaatcagaggcagttaattttatcagagaaaaaaattggaagataaaagctttggaagatatcagagcaaaaat

SEQ ID NO: 17508 - DNA, 201 bp, Homo sapiens
cttcaaccctttcgagagaattccaaatacactttttctaaatcaatatctctaaaacttgggtaatgtacaaatatcttttaaaggatgagtcctcttgkattctgaatggacacaaattgttttactcacaatgttacttaagtatttacaaacagaaaattcttttattttacatatccacaaacatatacatacatt

SEQ ID NO: 17509 - DNA, 201 bp, Homo sapiens
gaaatattattctggtattctcaatatttgcatagcctctcattattctttgatactttgattattgtatgagtcagtcatcatctctgagtccttgaacyaggcaaagcactataccagcccaggagggggctgttcatatgttcattcagcaagtgtttgctgaatgtctatgatgcaaccaaaactaataaggaaata

SEQ ID NO: 17510 - DNA, 201 bp, Homo sapiens
gcactcacatttctgggagacgtgtttgctcagttagaagtcacagggagctagatagagctgctccatgtagagcacctgaagacagagggcagaccatraggttccagccagacggaggtcagggcagagtcctgccactgtgggaacacttggaggataaggctgccaggtggaccggctagggaacaaggatctgga

SEQ ID NO: 17511 - DNA, 201 bp, Homo sapiens
taactctgtgtcagttactcagagcatgaagggcttggattaatatatggagccatcacatttttcttggctttggtccctacccataaacccaggataaygtctccagtttccctgcttgcaaacattctggccacaatgcatcaaagaaaaaaatgagactttgttaggaaaaatattgatcaacattattatctcttg

SEQ ID NO: 17512 - DNA, 201 bp, Homo sapiens
tacccataaacccaggataatgtctccagtttccctgcttgcaaacattctggccacaatgcatcaaagaaaaaaatgagactttgttaggaaaaatattsatcaacattattatctcttgagcaacaagcaaattataataattgaatactccatggtatctcatgagttttcagtattctgcaaaaacatttatcgtcc

SEQ ID NO: 17513 - DNA, 201 bp, Homo sapiens
gaactacaacccaggtctaatatctcctaactcaaggctgtttctgatactgtagtttagagattaactatggaataggaattctgcctaagactttaacwggaattgctcctaaaagatcagcaatgaagagatttttaacttattgtgtagggatttcagtttactgtaagatcatacaaatttccatggaatgctttt

SEQ ID NO: 17514 - DNA, 201 bp, Homo sapiens
ttagttttaaaagttaagcaggaggagagccagaagacaatttcaattctctgttcataagttttcacttcttttttctgctagaactattaagttcacarggctcagacagagacttgaggactcttacagttattgattgtgactgcacaagatgagggtaatgtttatttgtcattataaatctggaaagataaaccc

SEQ ID NO: 17515 - DNA, 201 bp, Homo sapiens
attagtctgttcctaaaggaaagcatctctgaaagcatctctcagctcagagattcattgcaaggaaaacctctctgcctttcctgatgttttctgttatrtaaatacagttgaagtgaacacttggtttgacccataattctactttttttgtattctgttcaaggtacaagagaatcaaaatgacaaagcacttatgaa

SEQ ID NO: 17516 - DNA, 201 bp, Homo sapiens
ggaactttaggggaagagaagatttgggagcacatccagatttcaaaatctgagatatcaagagagcaactgtagctcagagatgtctggcatttattagyggtcagtttatatatagtactaaatgcaagtagtctcttagtatttctcatagaaagttatcttaggaaaaaatcctagctggtagtaatgcctgggtct

SEQ ID NO: 17517 - DNA, 201 bp, Homo sapiens
gaactagagaggaatagagggtgggagggagagaaatagaacctcaactatctgaaaaataggtacaatgaaagggtataagaaaataaggttatggtccygttccaagatgaccgaatagtaacagctctggtctgcagctcccagcgtgatctactcagaagatgggtgatttctgcttttccaactgaggtacctggt

SEQ ID NO: 17518 - DNA, 201 bp, Homo sapiens
cttcctcctgtatatctagattatccaggtttctccccagaactaaagtactgagactaagccttggggatttagttcagcttaactcctgaggtgcctayttggctctcgatcagtttataggaatgatcatgcatgagttgggtcctttttaggttcaaaatagggagagagtcttttcaagagaaagtctgagatatg

SEQ ID NO: 17519 - DNA, 201 bp, Homo sapiens
atgttgaattggaaaagcaagatttgagaatattcctctttactgcattgtcattgcactctagtccttctgatttcccttgtttctcagatgatccctaygcccaattatacagaacagtcttcctctagttacttatatcaaacacttgcctgctagctgtgtttggcaggccagcaggatgaggtaataatcagaaga

SEQ ID NO: 17520 - DNA, 201 bp, Homo sapiens
tacagagattcgaagtgttgcctttttcctccctatcctttcttctttttccttcttcctcctgatttcctcctccttctcagaagcggacacttgcctcrcccagtagctagttctcagcacctcctttctgcctcctccttcccctaaatggtggcagttggcctctccctctcctggtgcctgaagtgggagtgacga

SEQ ID NO: 17521 - DNA, 201 bp, Homo sapiens
aataagacaacccttgatttctcaaacttcagtactttctggctttctttcctttgcacatacctttcctattcctggaatgctagtccccttaactttcygtactttctggaagtccttccaacctcctagcctccttccaactctaagctaggactccagatgtttctgaaactcctgaagcaaaaattttagcataat

SEQ ID NO: 17522 - DNA, 201 bp, Homo sapiens
gcgtaggagtaatcttggttcatagaaggttttgaatgttgttcagatgataagatatgcatgcacgcctcaaacttcaaaaaaaatgatgcaagcattaratgattcaagagggtcattgagaagtaaagcatttcaattcctgaaaacatagaaaatggtttttgtagataaaacccttcattttttatcataaataag

SEQ ID NO: 17523 - DNA, 201 bp, Homo sapiens
gcaagtaaccagttttactaatgcattcatcgctcatcttcattgctcatggtatgtcaaacctttggggtttgactcagaaactgctaaccttttagagrctttatatgttgtactgaccaaggtaggtttgtatagcagccctatactttggggatcatttgcctaccatggcatatatttgaaattgctttggacaag

SEQ ID NO: 17524 - DNA, 201 bp, Homo sapiens
tgaataaaagcttctttttttgttaatcagtcaataaatttggctaattagtttcagagttcaaggaagaagcaaaatatcacatctctagaagtgttggraaaaatataatttctttctttacttatattcacctcatggtaggttatattgaaggctgacatggagaatgtttacttttctatttggcatagctaacta

SEQ ID NO: 17525 - DNA, 201 bp, Homo sapiens
ttccaagacataaagtttctgatcctgtttctggatcagaacaccaaactagctcaaacaggaaagtgttttggcatatgctaacagaatgtcgcttcagyactgtggacttgctgttcagtttaatggcccacctccccaccctgctgaggtcattaaagtgttctaaagccccttcagaactcgaaaatagtttctgtt

SEQ ID NO: 17526 - DNA, 201 bp, Homo sapiens
tgaagaaagaggactgttaatttatgtataataaaagcacttagtcaatatttattctatttctatagcccagtgtgtaaagatttaaatcataatgagcyactcctaggcaagcagaataatgcaacataggcgtttccagtggaaatctgctaaccttatactattgaggaaaacccaacatctgcattgaaataagga

SEQ ID NO: 17527 - DNA, 201 bp, Homo sapiens
tgagctactcctaggcaagcagaataatgcaacataggcgtttccagtggaaatctgctaaccttatactattgaggaaaacccaacatctgcattgaaayaaggacattctttggactcttaagaaattacaggcctcatttttgtgggttgaagtgtttggataacttgataaggagattatataattcccttataggg

SEQ ID NO: 17528 - DNA, 201 bp, Homo sapiens
tatctaaaggagcaatcttagtaaatccacttacatgtatgtgcatgttaaagacctaactggtctttaacctgattcctttttcaaaaatacagctttaytgggtgaagtgtaaatggaaactctctactattcttccaatgctttggtaagtctaaaattatctcaaaaaagtttttttagaaagtggaaaataaaaga

SEQ ID NO: 17529 - DNA, 201 bp, Homo sapiens
gtcttgataactcatattaccacagtaagattttttttaagtgcaatttcctgcaaagtggagattaattcctgacgctttgaggttttgggttcttcagwtaaaagactacaaagggaaaacatgaacataccatctccgggagtaattatactctttagcattcatggatgttatgctattttcctcaacattagcaca

SEQ ID NO: 17530 - DNA, 201 bp, Homo sapiens
agcattcatggatgttatgctattttcctcaacattagcacaactttgccctatttcagaataaaacaaacatttccttatggctttaactacctatatcrtaattcactgtgcaatagctttcagtgctaggatgttaggtaaatacttgattaatgagttactttagattactaatcattaaatatggtctcccttttt

SEQ ID NO: 17531 - DNA, 201 bp, Homo sapiens
aatgagaaaaaaaggatatacagggaatatattgcaattgcaatcatagcaaagaaagaacagaaaggatgtcgattatgagatttctaattcttgatttygtagcagtttccatattcttgctagaagctggaaagttgctcagtccctggtatcaatcacacctcagctagacactgaggctagtcactgctgctggaa

SEQ ID NO: 17532 - DNA, 201 bp, Homo sapiens
aaagcaattaataagaaaatagctctgtagcccaatgagaattaaatagtgagattaatagaaactaaataattggatggtttgggtttggattatgtacrtgaagatttttttttttaaagtgaaagaattttgttctttgttacactggtaacattaaaattaatgagtaagggtaaggaggactgaggaattgaggta

SEQ ID NO: 17533 - DNA, 201 bp, Homo sapiens
atatgtaaaatagacttgtaaacaatgaggcttgatatgaaacagtaaagtgatcatttttatagcattatatacagagaagacagtgactactattttcyagctaagagagtgtacatctaggtgtgtatgagggtaatgggcctggtgaactgtaggagagggaagaggaaagtcagtcaagggagccttcacagaggt

SEQ ID NO: 17534 - DNA, 201 bp, Homo sapiens
tagatataaaataatatgacacatattaaaagcactcagaaagctaagggtttttcttcagagcttttattcatttttgtatctaatgttgaaaacaagtraaaatatatacagaagagcccctagctgaaatgtattcatatggccccctgacctaatcacagattcttctatttcaacagaactttcttcctcacagat

SEQ ID NO: 17535 - DNA, 201 bp, Homo sapiens
actaaaagtctacagtatatggagcccaaataaaatttggccaaaaagagtgcttaggatgtaaactgctttcagtttcaacctttgattccacttactcrtggttcacggagagctttgtaaggatcagtaacttctccgaaataggtaataatagtgctaactgggaggtatttaggacataaaggtgttggggtgtgt

SEQ ID NO: 17536 - DNA, 201 bp, Homo sapiens
tgtgtgtgtgtgtgtctttgtatatatgtaagaatgtgtgtatgtgtgagagcaagagagaggaaactcaaagaggagtgtttgtcttaagacctgttcayactggtatattggtgagacttctcacttctggttggaggtttcacatatggctcaactcaagtcattaatctctttttaatttttactcttgaattcctt

SEQ ID NO: 17537 - DNA, 201 bp, Homo sapiens
ttggaccttattaaaacatgttttgctgctttctctcagaacatgtataattaaaatattctccttgaattaaatattgaaggttttgattcctaaagtcrtgtatattatattatttctccattgaatcttctttattatttaagaatactctacccaggctggactggtggtgggcgcctatagttccaactactcagg

SEQ ID NO: 17538 - DNA, 201 bp, Homo sapiens
accttctttaaaggactgatctgggagtcaacaatccaggttgtttttccaggatatgccactgatgagctttgggttttggcaaggtgctcagcctttcyctatctgtttactgatgtatcaaatggaataataatccttgtcttgtatacctttcaggattgtcagaagatcaaattaatcaagttatgtggaaatcct

SEQ ID NO: 17539 - DNA, 201 bp, Homo sapiens
gtcttttcttcttaaataatctgatgcaaagaggcaaataatactgcctactgcctagaaaagggattttgacattatttcctgatttaatttcctatgtrttgaatcgatgccagacactcttctgggggtggggtggtaaataagacagattaagttctcactctctcatgaagcttatattttagtggtggaaaagat

SEQ ID NO: 17540 - DNA, 201 bp, Homo sapiens
gaattgcttcttatcttcaatcacctttgtaaatgtttctacaaatacatctgtttaaaaaatttttttcatagcaaatgtgttgtgcgcagatgactgcyttctcatatcctgaataaatacaacactatgctatataaaaacaaaggattgctagggattttgttgggttgggtgggtggttaattcacagaaaatgaa

SEQ ID NO: 17541 - DNA, 201 bp, Homo sapiens
tcctgcactgccaaaatccacagaacaatcaaaggtgaggaaggaaggtccttgattccttcacattggaagagatttaaaactaggattccacattagayacatgcatgcatttttccctagaacattagtatttatggtagtgggttctctatgaaggattggctactaacacttatttaatacctgagtgtgtgagca

SEQ ID NO: 17542 - DNA, 201 bp, Homo sapiens
attatttaacttttctgacctctggttttctcatctctaaaacagggttttctgaaaagagcttagaacagggcctggcccagagctaagctttatgcagktagggctgctgcgggacacaccagccacccaggattgttttaaaaacactgtaatggaagctgacttcttaagataaccatttggagaatctttttgaaa

SEQ ID NO: 17543 - DNA, 201 bp, Homo sapiens
gacttttatgttgtccctgaacatttacagagaataggagcagagaatattaaactagttattttatcaaaaggcagtgatatgtgttaatttcccatacktcaatatatgcatcaatcacatgatcagaaagcattcagtaaaacaggcttattagtttttgcccttcttcctcctcctcttttccactatttcatcttt

SEQ ID NO: 17544 - DNA, 201 bp, Homo sapiens
attatcaaaatcagtgtactgaaaatttaaatgcagtcacaattatttagttcatgttgctccaaaatatcacattaggaacttgaagtagagagacttcragttgttaaactgtgtcttgataactcatattaccacagtaagattttttttaagtgcaatttcctgcaaagtggagattaattcctgacgctttgaggt

SEQ ID NO: 17545 - DNA, 201 bp, Homo sapiens
cttttggggacatgtaacaataaaaatgctttctttctagttattatgatcatgttattgaataattcattatatatatttttaaatggaattgaatgctstatgataaaagtatatgaatagtttttgcattagaaggcagaagaaagtatgtgagttgaatataagaatgagttcctctgagtaaaaagttacatttcg

SEQ ID NO: 17546 - DNA, 201 bp, Homo sapiens
cggaatttagtgagttattgaagcacttcccatcccgagtaggcaggacagcatgtgtggttgggaaaacatttcttcttaaacaaacggtgatgcagtgytgaagagctactgaaggaagagtatacactcatttccagtttttccaaacttggcatttttaaccattgttggccttttaacctcttttagtaattctat

SEQ ID NO: 17547 - DNA, 201 bp, Homo sapiens
tttgtgagtgtgtctgtctgccttatgagaatgacatttatgaggatgaaggagggttggagggtttgttgtaatgcttttacataatcaagatcaaattrttcaagctctttaatgttatctatttgttgtatttagcaaaggaatgaatttgtagctaataggcagtaatttggtttttattcacctaatagaaatatt

SEQ ID NO: 17548 - DNA, 201 bp, Homo sapiens
ttaccaaggactttactatttaataaggccctgataggcatcattagggctacctattgctgagttatttatggcctggcttttacattcagaatttgttygtggcctggcatcttattccagtcttccctaaacactgtattttcatataccctactactaaaccagttccacagagattacagattacacatctcagtc

SEQ ID NO: 17549 - DNA, 201 bp, Homo sapiens
cagaaattcagctttcgaatcacatccttcccaagtccctgtcagctgtgagcaatagcaaatcatttttccagtagcttaggagcctgtgaatggattcygttcacagctttaacactgatggtggggagtcattccatttcctcattgaaaacgactgttggcaatccccaggctggaaggatgatatagagaagccta

SEQ ID NO: 17550 - DNA, 201 bp, Homo sapiens
ctcgaaatgattagctgagaaaatgaaatccataaagctattagttcagtcgctggcacttgaaagttttcagtaagtgactactgctgccattattagaycctttgcaggtacagagacagcttttatagtcagagggaattcattttgtctcctagtttgcctaagaataagtgatccatctttatttattctactgat

SEQ ID NO: 17551 - DNA, 201 bp, Homo sapiens
gtttgtagttctcctgactcatattttagtatcttaggaaggaaaatttagtgccacaaatgtttaccatctatattctcttggtttctgagacttcccayggcaattaaaaaaatttagatattacaccttttgcttcaaaggtcataattccagaagtatgactcttatctgaccttttagaatgataaatctaagaaa

SEQ ID NO: 17552 - DNA, 201 bp, Homo sapiens
agcaggactttaacattctagtcctctgtgtcagctgtctgtgttacagaatttatttgaactatagagtccctaaatcactacagcataagcctcagggwaaataaaaactcaaaaatgtataaacaaactatactaaaattgagctactgagcaccttagtatacttgcttccctttagttaacgtattttcaccaaca

SEQ ID NO: 17553 - DNA, 201 bp, Homo sapiens
atattcacttactggtgctaatttcacttttgagacgacactgaaacttggcatctcaataattttccagtgattttggtaaaagctagggaaaggactgygaatgccaaggaatggaaaacgtgtgattacataggtttcttcacatcactgttttctgttgaaaatactgcttcttacctcatagtaccttccctcttc

SEQ ID NO: 17554 - DNA, 201 bp, Homo sapiens
ctcaaacttcagtactttctggctttctttcctttgcacatacctttcctattcctggaatgctagtccccttaactttccgtactttctggaagtccttycaacctcctagcctccttccaactctaagctaggactccagatgtttctgaaactcctgaagcaaaaattttagcataatcctactgtggtcatagttaa

SEQ ID NO: 17555 - DNA, 201 bp, Homo sapiens
tgagctcaatattgtatatatgatgttgtgtatacaactaacattccttctaactttttactggtcactgtttttcaatgggtctcaattggatttttttwaaatttcttctttcaggatgttaacaaagaagaatcaagtagctattatcagaattcagttttgttttctgtggaaatctctttccctaacaggttataa

SEQ ID NO: 17556 - DNA, 201 bp, Homo sapiens
ttatgaaaattctcctgtgacgttttgtcttttcatgttaggcctaagcagagggcctaaagggtgtggttgtcagttacacttgggaaaatttataggartgggaaattctcaaatgagatcataggggtctccaggcagagggccaggctgagccacaagcagctccatagagccagggtcagggagctggagagtcag

SEQ ID NO: 17557 - DNA, 201 bp, Homo sapiens
tttgattgtttataaatcacctagtctaaggtattttttttatagcagtccaaactaatacagaaaaagtgtgtgagagaccaacatctccaacatatttkttggtgtattcttacaatttggatgctagagatattatgttattaggatatctgtcctttgttttctataatgagcacatactgcttttgtagcaaatga

SEQ ID NO: 17558 - DNA, 201 bp, Homo sapiens
tgatttttcaacttgaaaaattgaaaagcataaaatataatttaagcactcagatattcatcaattaaaatttatactttttaatacatatgtaaaataamaattacagataatattgaagtttctccttatatctgggcttatttctatcttgaaattcatttttacacttttatgtacatatatatcatgaacaatata

SEQ ID NO: 17559 - DNA, 201 bp, Homo sapiens
atttgcaggagttgagaacatctgatttttcaacttgaaaaattgaaaagcataaaatataatttaagcactcagatattcatcaattaaaatttatactktttaatacatatgtaaaataaaaattacagataatattgaagtttctccttatatctgggcttatttctatcttgaaattcatttttacacttttatgta

SEQ ID NO: 17560 - DNA, 201 bp, Homo sapiens
aaggtaagcagatctgataggatgtagacattgcaaaacagacctcagcctattgattttgctgctgtttcctggctgtctggattccccatggaaaaaayacaattgtaaagtctagagcaagtactgagaactccacagggttggagtgtggcctgctgttcttgtcaattcataataattcttccagaaaaaatcttc

SEQ ID NO: 17561 - DNA, 201 bp, Homo sapiens
tttggaaaacctatgtgttttcctttgttgtgcctgttccttgtcccagaggttaaaaattcaaaagctacagggtagcgttgccagataaagtatagggsccctggttaaatttgaatttcaaataaacaaacaactttttattataagtatatcccaggcttctggggacacactgtgtctcagcctgctttgtgttgc

SEQ ID NO: 17562 - DNA, 201 bp, Homo sapiens; identical to SEQ ID NO: 2125

SEQ ID NO: 17563 - DNA, 201 bp, Homo sapiens; identical to SEQ ID NO: 2125

SEQ ID NO: 17564 - DNA, 201 bp, Homo sapiens
agctgatataattataatgaaaaactgaaaaattcaccataatattgtggtttttttaaaaatgttttttcccattaattaatggaatttttgaccaagtyctcaaaaatccaaaagattgtggaagatttaaaaaatacatcactacggtcagaaattagagaacattccttcctgtcatacaaaccttgagcatttaaa

SEQ ID NO: 17565 - DNA, 201 bp, Homo sapiens
caggcatttatatttgtgaaaccctacatgtgactgtgatgcacagccagggctgagcaactctcttacatatattagatctggatgatctcattcaccaytggggctccaattgtcatctacatgctaatgactccaaaattaacatctcaaggcatgaccttccttctcagttccagacctatatttctcactttttta

SEQ ID NO: 17566 - DNA, 201 bp, Homo sapiens
ataatattgaacacttattaagcccttgaaggctttactaaatccataataaactgagaggcttcaattgttacctttctttgtgttggtaatctcagatrgtatcgtttctgatttctgctgagaaatagagtccatcaaatctccactgtgaggcgttgctggcatttcagaaggaggacaaataagacctgaattggg

SEQ ID NO: 17567 - DNA, 201 bp, Homo sapiens
tgggctttgcccatttcgagcttcctggctgctttgtttacctactcaagcctcagcaatggcggaccccctcccccagccaggctgctgcctcacagttygatctcaggctgctgtttagcagtcagcaaggctccttgggcgtgagatccaccaagccaggcatgggagagaatctccttatctgttggttgctaagac

SEQ ID NO: 17568 - DNA, 201 bp, Homo sapiens
aagaggagaataagcagtgtttggttagtgctgactgcccaggctgcaggaggtctgagacgcaacctaatagccaccaatttctgatccctgatttctcmccatcacatttataagtcattgttccagccttaatctttggtttaccaactctgtcataattagatatttctattgtatgcgttcattatagacagctga

SEQ ID NO: 17569 - DNA, 201 bp, Homo sapiens
tcagtagtccatagaatatgttacatctccactatatctttaaactataaactgttaacaaaaatgtaacacatagccaagtgtttaaaatgaaaactcayatttctgtgtaattaatgggtcaagtaagaaaggataatggaaattagaaatgtgaaggacctcttcaaggagaactacaaaccagtgctcaatgaaata

SEQ ID NO: 17570 - DNA, 201 bp, Homo sapiens
ttttatgtatttattccctttgatcactattctctgcagaggcaagcattccagtagtttggtatagtttttgttcatatccttgccgtatgtgtactackgctttgtgtgtatgcatgtatcagtctaataagtactaatttgttgctcatactattattattaatagtaaatatggtatggagtttatcatgagctgga

SEQ ID NO: 17571 - DNA, 201 bp, Homo sapiens
tgtttagaatgaagctcagagaaccaaagcatagaagtaaaaaaaaaataaataaaagttcaaggcctcttaaatatgtttaactggaattccagaagcaragaagaaaaaagaaatggatcagaaacaatatttgaagagataattattgagaaatctctagaatcaatgaaaaacacaaatttacagattcaggaagct

SEQ ID NO: 17572 - DNA, 201 bp, Homo sapiens
taaaatggaaacaatagtagtttgttgtgagaattgagtgagttagtatatggaaaatgcagagaacagggcctagtacacagtgagtgctcagtaaataycactattattgctcttattctgttgggcatttggtgtttttaattcatgcttgaatccaggttcttggatgctggttcatgcttccaaaatggtgataga

SEQ ID NO: 17573 - DNA, 201 bp, Homo sapiens
ctcaattaacactactatcaatctctgatcataccatcaatagcttcactgatttaattatttaacacctgacaatatgttggacatgtgacataaattgyttgtaaaatgaaatggtaaattatgcaagatgcaggacttcattgattcttacccaagatattttatttttttaaaaaatttagctggagcttctcttaa

SEQ ID NO: 17574 - DNA, 201 bp, Homo sapiens
taacatgactttttgtagtttcctccattttagggaaagactgaaatgaagatagaattacttatgatgattatattacttacaagacttactttgtttaraaacattctctcaagctgatcttttgtaaaaactactataaaatgaattagtttaaaaatactgatataaaattaatttttctaggtcattctttctact

SEQ ID NO: 17575 - DNA, 201 bp, Homo sapiens
tgtaactcatgcaaagataatttttagactgggaaattcaaatgaaccatggaacaaaaggtaatgctttaagagaataaaaagagaagacacagagttgragaaaatatctgcaaaagacatctgttaaaggactattactcaaaatgtatgaagaattcttaaagctcaataaccagaaaataaaaacctgattaaaaa

SEQ ID NO: 17576 - DNA, 201 bp, Homo sapiens; identical to SEQ ID NO: 15608

SEQ ID NO: 17577 - DNA, 201 bp, Homo sapiens; identical to SEQ ID NO: 15608

SEQ ID NO: 17578 - DNA, 201 bp, Homo sapiens; identical to SEQ ID NO: 15610

SEQ ID NO: 17579 - DNA, 201 bp, Homo sapiens; identical to SEQ ID NO: 15611

SEQ ID NO: 17580 - DNA, 201 bp, Homo sapiens
ctaaatcagcagaataaaatacatagacaaaaactaggaattaggaagagagagatacaaaaatggtcatcaacttgaaatattacaaaaaatgaagaatwtataggtttacagtgctcaacaactgtttactagtcaaacaacctgaaaagactttttcttaatatgttaataggaaaaacctgagaagtgcaaaagcaa

SEQ ID NO: 17581 - DNA, 201 bp, Homo sapiens; identical to SEQ ID NO: 15612

SEQ ID NO: 17582 - DNA, 201 bp, Homo sapiens; identical to SEQ ID NO: 15612

SEQ ID NO: 17583 - DNA, 201 bp, Homo sapiens; identical to SEQ ID NO: 15614

SEQ ID NO: 17584 - DNA, 201 bp, Homo sapiens; identical to SEQ ID NO: 15615

SEQ ID NO: 17585 - DNA, 201 bp, Homo sapiens; identical to SEQ ID NO: 15616

SEQ ID NO: 17586 - DNA, 201 bp, Homo sapiens; identical to SEQ ID NO: 15617

SEQ ID NO: 17587 - DNA, 201 bp, Homo sapiens
tgtaaaagaaggcagttttttggaaagactgtccaggtgattatactgaaaggaaaaaaaaacttattttagacttatacatggctgaaattcaactgtcrcaaatatgttaaattaataagcaataatgaaaacatatttttaatgccctgaaaataaagtttacaaactaaaattctacaagagactgattaacccaat

SEQ ID NO: 17588 - DNA, 201 bp, Homo sapiens
attgtggtttttttaaaaatgttttttcccattaattaatggaatttttgaccaagtcctcaaaaatccaaaagattgtggaagatttaaaaaatacatcmctacggtcagaaattagagaacattccttcctgtcatacaaaccttgagcatttaaaaaactgactacatattaaacaacagagcaagtattaatgaatt

SEQ ID NO: 17589 - DNA, 201 bp, Homo sapiens
gcccttggatggatgtatacgctaataaaatgactttttagaagaaattatatacctcaactgagggaaatgtttcccatgaccttgaccggagattaggrgggacaattgtatcttccttttttacttgccatggtgatgcttcatggaaagggcgaaggactgtgatggttagggtgcctggttcaaagaaagttgtca

SEQ ID NO: 17590 - DNA, 201 bp, Homo sapiens
tgtgttgcactagacaaatattggtagaattacataatttcaggtttcttaggaaaccaaaagcaatgattgctctgtttctgattcttttgggtcaggtyacctagattccattaccttaagggaaacctgcagcctcagtttcacctcattctttatgacctcatgctgaatgaattggcgcatctgtagcacactggg

SEQ ID NO: 17591 - DNA, 201 bp, Homo sapiens
aacctgagaagtgcaaaagcaaagctttaagggccacaggatagaactgcatgggggcctcagagaggccctgtttctaactgtgcacttaagtgtcctcwtcaataaaatggacagaattgggttagatgatgtgtaggatcctttcaggtatagtttttttattttacctgtaaatggaatttgcctagttcatgtctt

SEQ ID NO: 17592 - DNA, 201 bp, Homo sapiens
gaaaagactttttcttaatatgttaataggaaaaacctgagaagtgcaaaagcaaagctttaagggccacaggatagaactgcatgggggcctcagagagrccctgtttctaactgtgcacttaagtgtcctcatcaataaaatggacagaattgggttagatgatgtgtaggatcctttcaggtatagtttttttatttt

SEQ ID NO: 17593 - DNA, 201 bp, Homo sapiens
aaaaaatgaagaatatataggtttacagtgctcaacaactgtttactagtcaaacaacctgaaaagactttttcttaatatgttaataggaaaaacctgaraagtgcaaaagcaaagctttaagggccacaggatagaactgcatgggggcctcagagaggccctgtttctaactgtgcacttaagtgtcctcatcaataa

SEQ ID NO: 17594 - DNA, 201 bp, Homo sapiens
ttaggaagagagagatacaaaaatggtcatcaacttgaaatattacaaaaaatgaagaatatataggtttacagtgctcaacaactgtttactagtcaaayaacctgaaaagactttttcttaatatgttaataggaaaaacctgagaagtgcaaaagcaaagctttaagggccacaggatagaactgcatgggggcctca

SEQ ID NO: 17595 - DNA, 201 bp, Homo sapiens
catgggggcctcagagaggccctgtttctaactgtgcacttaagtgtcctcatcaataaaatggacagaattgggttagatgatgtgtaggatcctttcargtatagtttttttattttacctgtaaatggaatttgcctagttcatgtctttgcttcgaagagaaacgtactttatttttttcataagtatttgatcaat

SEQ ID NO: 17596 - DNA, 201 bp, Homo sapiens
taaaaaataaagaattccatcaaatgctgattggctgtggggaatttgttccaatgtttgttttacctttgcaagaggttgagacttaggcttggaactcwgcaaataatgaggcaacttcactttttcttttcttgtttgtcccgcaacatcctgcagcaaggactgggttggaattttcacgggctcataagattctgc

SEQ ID NO: 17597 - DNA, 201 bp, Homo sapiens
taatttctgcactatatatgattactcaagttgaactttaaaggatatttgcttccacaggtaggaacagaacctcatgctctgtcataatctcgatattktgagagatgtgtgctgatcccttggccccatcctctccaacagctgtggcaaataactctatattcagttctgtctgcataccagctgccacctataaga

SEQ ID NO: 17598 - DNA, 201 bp, Homo sapiens
aaccttatgtggcttgaaatctagaaaacccaaaatgaaccttataaagtgatattttgtaaaatgatataatgactactaatgtttgcatgaacaaacaytgaagaaggtgttttacaatgaatgaggtaccttttctgccactctctttagaaagactaaatataagaaagccattaagaggcagggattcttaaaata

SEQ ID NO: 17599 - DNA, 201 bp, Homo sapiens
agtttcacctcattctttatgacctcatgctgaatgaattggcgcatctgtagcacactggggctcttgagtatggcacccggggcactcactagctgttyggactcaatgcaaaggcctttccaaatctgagtaccaaacggaggtcctggagtttttttctgttaacaaaacaaagcaataacaccaccaaagaaatca

SEQ ID NO: 17600 - DNA, 201 bp, Homo sapiens
gaagatggaacccaaaaagggatgactttgcattattaatggcagcagatgcaacagaggatgtgttcacttttcctccaacagaatcttgcacctttgcrttaagaaaaaattaataaaatggttctattttgagttcccaagattaaaaaaaaaaaagtccctgtcaccagaggaaaataactgttgggttgctggagg

SEQ ID NO: 17601 - DNA, 201 bp, Homo sapiens
aaaacaggttctggttctacttcttcttcctgtaaataattcagcatgtgaataatgggctgtcattttcttaatgagctattatttattttgactaagcmaggatatgctgagtgctcaggacatgacttgcacagagctaggtggcccctgcaaggacgcaggagtctctgtggttttgcaatttatattctacttgca

SEQ ID NO: 17602 - DNA, 201 bp, Homo sapiens; identical to SEQ ID NO: 15619

SEQ ID NO: 17603 - DNA, 201 bp, Homo sapiens; identical to SEQ ID NO: 15619

SEQ ID NO: 17604 - DNA, 201 bp, Homo sapiens; identical to SEQ ID NO: 15622

SEQ ID NO: 17605 - DNA, 201 bp, Homo sapiens; identical to SEQ ID NO: 15625

SEQ ID NO: 17606 - DNA, 201 bp, Homo sapiens
cgggtctcaaactcctggcctcaagcgatcctcccacctcagccttccaaagtgctgtgattacaggtgtgagacaccatgcctggtgcttaattattttmttttgtctgcatgtgaataatagggcagtttccatgttatgacagatggtctagaatactggttctttgatgaccttgttacattcaaaggtagtaaatt

SEQ ID NO: 17607 - DNA, 201 bp, Homo sapiens
acccttgaagcctcctgctctgcgggtggcatcaccgttttatagaactcatagtgcttcaccctctgggggtagctctgacggaccatgatgtcccaggkgggttcctcatctataacatattgacctaaaaaaagaataaagccttcttgtgaactggacaatgctgcagggctggattttatcatcttgcttaattat

SEQ ID NO: 17608 - DNA, 201 bp, Homo sapiens
actaagtacttagacagtgcctggccatagtaaatgctacaaatgtgaaaacagtctattgttcattatcaacaagatgtatgtttaactggcatgaaaayacacaatttcctgttttctacgtgacattttgctccctgcttccccaccctaccccatatagcacttacctgtagattcttgtccaatgaaagtcaacag

SEQ ID NO: 17609 - DNA, 201 bp, Homo sapiens
cagtaccattatgaattcactatttaaatttttaaaattagtttaagatagcttgagagggagaaaaggaaaaaactgttcagtttgcaatcttacatcaygcagagaaatgacaagtttatttgtatcctgctctgcatatagtgttttttaattctaactatattatttatcatttgtcatttgaaggtgtcattcctt

SEQ ID NO: 17610 - DNA, 201 bp, Homo sapiens
aaagtctcgctttgtcatccaggctggagtgcaatggtgcaatcatagctcactgcagcctcaaactcctggattcaagccttctgagcagctgggactayaggcttgcaccacaacaccctgttaagtttttctattttttgtagacagagggtctcattatgttggctaggcgggtctcaaactcctggcctcaagcga

SEQ ID NO: 17611 - DNA, 201 bp, Homo sapiens; identical to SEQ ID NO: 15626

SEQ ID NO: 17612 - DNA, 201 bp, Homo sapiens; identical to SEQ ID NO: 15626

SEQ ID NO: 17613 - DNA, 201 bp, Homo sapiens; identical to SEQ ID NO: 15628

SEQ ID NO: 17614 - DNA, 201 bp, Homo sapiens
tgaacgcaggagaattgcttgaacccaggaggcagaggtttcagtgagccgagatcgcgccactgcactccagtctggtgacagggcaaaactccatctcaaaaaaaaaaaaaaaaaaaaaaattcatctaacagacttggtgactaccataactttcctaccctgttccttgcaggggtgtccaatattttggcttccct

SEQ ID NO: 17615 - DNA, 201 bp, Homo sapiens
aactgaattatacccagatcttcaaggttccttctattaaatcaacattatataatacaatacaacattaactctgaaagatttattaaaactaatgagtaaaaaaaaaatcccaagcatttctttgattctactactatattcatagttttaaaaagtggtttattaagtatagataaattaagccagaaaattagatct

SEQ ID NO: 17616 - DNA, 201 bp, Homo sapiens
ttccagcactttgggaggccgaggtgggcagatcacctgaggtcaggagttcgagaccagactggccaacatagtgaaaccccgtctctactaaaaatacaaaaaaaaaaaaaaaattagctgggtgtgatggtgggtgcctgtaatcccagctactcaggaggctgaggcaggagaattgcttgaacccaggaggtggag

SEQ ID NO: 17617 - DNA, 201 bp, Homo sapiens
cagcactttgggaggccgaggtgggcagatcacctgaggtcaggagttcgagaccagactggccaacatagtgaaaccccgtctctactaaaaatacaaaraaaaaaaaaaaattagctgggtgtgatggtgggtgcctgtaatcccagctactcaggaggctgaggcaggagaattgcttgaacccaggaggtggaggtt

SEQ ID NO: 17618 - DNA, 201 bp, Homo sapiens
tcacttaatggatgaaagttaaagatgaatgagagaaaatcatggttttctaggatgtcaaagctcaggcagaacaatacaggcagaatgacttacaaatwtaaaccaccacaacacaacatggccgatacaagaatggagatatgtacatggtgtcttgttatcagataagagaatgaccgataagtgtatttaagatga

SEQ ID NO: 17619 - DNA, 201 bp, Homo sapiens
aaatcagcagaataaaatacatagacaaaaactaggaattaggaagagagagatacaaaaatggtcatcaacttgaaatattacaaaaaatgaagaatatwtaggtttacagtgctcaacaactgtttactagtcaaacaacctgaaaagactttttcttaatatgttaataggaaaaacctgagaagtgcaaaagcaaag

SEQ ID NO: 17620 - DNA, 201 bp, Homo sapiens
taaaatacatagacaaaaactaggaattaggaagagagagatacaaaaatggtcatcaacttgaaatattacaaaaaatgaagaatatataggtttacagkgctcaacaactgtttactagtcaaacaacctgaaaagactttttcttaatatgttaataggaaaaacctgagaagtgcaaaagcaaagctttaagggcca

SEQ ID NO: 17621 - DNA, 201 bp, Homo sapiens
atgtgcattgataaactaaaagttataagggcacagaaatgcaggcatatttataaatgcacacaaaatgtatcccaaaacacagaaaaaagatgaaataacacacacacacacacacacacacacacacacacacacaaacctaggcacagcacataggttttgtacacagataatatgtaggctaatatctatatttaa

SEQ ID NO: 17622 - DNA, 201 bp, Homo sapiens
tgtgcattgataaactaaaagttataagggcacagaaatgcaggcatatttataaatgcacacaaaatgtatcccaaaacacagaaaaaagatgaaataacacacacacacacacacacacacacacacacacacacaaacctaggcacagcacataggttttgtacacagataatatgtaggctaatatctatatttaaa

SEQ ID NO: 17623 - DNA, 201 bp, Homo sapiens
gtgcattgataaactaaaagttataagggcacagaaatgcaggcatatttataaatgcacacaaaatgtatcccaaaacacagaaaaaagatgaaataacmcacacacacacacacacacacacacacacacacacaaacctaggcacagcacataggttttgtacacagataatatgtaggctaatatctatatttaaat

SEQ ID NO: 17624 - DNA, 201 bp, Homo sapiens
aatgcaggcatatttataaatgcacacaaaatgtatcccaaaacacagaaaaaagatgaaataacacacacacacacacacacacacacacacacacacayaaacctaggcacagcacataggttttgtacacagataatatgtaggctaatatctatatttaaatacacatattacatatactggatggttcttacttaa

SEQ ID NO: 17625 - DNA, 201 bp, Homo sapiens
gctgcacccatcaacctgtcatttacattaggtatttctcctaatgctatccatcccccagcctcctacccccgacagtcccccatgtgtgatgttccccrccctgtgtccaagtgttctcattgttcaattcccacctataagtgagaacatgtggtgttttgttttctgtccttgtgacagttttctgagaatgatgtt

SEQ ID NO: 17626 - DNA, 201 bp, Homo sapiens
ctcattgtggttttgatttgcatttctctgatgaccatgatgatgagcattttttcatgtgtctgttggctgcataaatgtcttcttttgagaagtgtctsttcatatcctgtgcccactttttgatggggttgtttttttcttgtaaatttgtttaagttctttgtagattctggatattagccctttgtcagatgagta

SEQ ID NO: 17627 - DNA, 201 bp, Homo sapiens
gttaaaatctcccattactattgtgtgggagtctaagtctctttgtaggtctctaaggacttgctttatgaatctgggtgctcctgtattgggtgcatatrtatttagaatagttagttcttcttgttgaattgatccctttacaaatatgtaatggccttctttgtctcttttgatctttgttggtttaaagtctgtttt

SEQ ID NO: 17628 - DNA, 201 bp, Homo sapiens
acaaggatgtttaagtctgcagaagttgtctgctgcctttcgttcagctaagccctgcccacagaggtggagactagaggcagtaggccttgctgagctgyggtgggctttgcccatttcgagcttcctggctgctttgtttacctactcaagcctcagcaatggcggaccccctcccccagccaggctgctgcctcacag

SEQ ID NO: 17629 - DNA, 201 bp, Homo sapiens
aaaaaacctttctgagatcatatgtactttgagtcttacaaaaaaaggcaactagcaaacaaagtaagagattataaaattatttcagaagtaggctgaaraggaaaaaatatttggttagatcatgtaatccatcttaatagcaagctggcattttgctttttacagcagcacatggttttaaacaagggtaggaagttc

SEQ ID NO: 17630 - DNA, 201 bp, Homo sapiens
ctgagatgggaggatttcttgggcccaggaggttaggctgcagtgagctgtgatcatgccaccacactccagcctgggtgacagagtgagaccatgtctcaaaaaaaaaaaaaaaaaatgcacttttataccagctcaagaatttagaattaaagcaataagaaaaaattatcatctcatagtcaaaaagtaccgagacac

SEQ ID NO: 17631 - DNA, 201 bp, Homo sapiens
tatataaaaatatatcttacaaattaagatgaaaatgatgaccatcacaatggtaaaccaagaaaagacatgaataggaaattcacaaaatgaaacaaaamaaacaggaaacatctttagatgtttaacctcaccagcaattaaagaaatgcaaatcaacataataagatgcattgattatcatgttgaataagattaaaa

SEQ ID NO: 17632 - DNA, 201 bp, Homo sapiens
ctgttaacctctcaggtctgcctatatcacttttaccaacttttaattttttaaagtatttaatttcaggtgctatttcttttagatattgaattatgtaytttacttttatgggattgctttctttccaagatttatgattcttgagtgcatggtcatctttctcattgagaatcccttttacttcttggtggtgtagtg

SEQ ID NO: 17633 - DNA, 201 bp, Homo sapiens
tgtttggttatatgtacttaagaatgaaatttacttgttaacattcaaacactccctaatgataatcatttcaatttttccagttggttctcttttgttarccaccaaaatcactccaccggtacccaatttgtggatatttgtttttttctaactagtcgtctattgttgaacatttaagttgttctgccttttctttgt

SEQ ID NO: 17634 - DNA, 201 bp, Homo sapiens
attttaaaaatgttaagtgaacaaattggtttgctagcaagatgcctttggccaaattaattttaaatgaattacctggagttattctgttttaacacttraacatttttacttaacaagagtcaaggggcctggcatgagaaattttatctagtataactatgtaaatgtggtacagaggcaatgacatatttaaacctt

SEQ ID NO: 17635 - DNA, 201 bp, Homo sapiens
atatacatgtatacatacatgtatatatataatcacacaagtaatcttatatgtataagtgattatataaaagattatataaaatgtcaaagcatttttattttgtatctatgtataaaagattatatatatatatactgtatacacacatatatagacacacacacacacacacacacacacctcttctattaccatcct

SEQ ID NO: 17636 - DNA, 201 bp, Homo sapiens
agtgattatataaaagattatataaaatgtcaaagcatttttattttgtatctatgtataaaagattatatatatatatactgtatacacacatatatagacacacacacacacacacacacacacctcttctattaccatcctgcaggaaaaacaatgaggagcattaaatcataacatgttattgacaagtgagcagac

SEQ ID NO: 17637 - DNA, 201 bp, Homo sapiens
gtgattatataaaagattatataaaatgtcaaagcatttttattttgtatctatgtataaaagattatatatatatatactgtatacacacatatatagacacacacacacacacacacacacacctcttctattaccatcctgcaggaaaaacaatgaggagcattaaatcataacatgttattgacaagtgagcagact

SEQ ID NO: 17638 - DNA, 201 bp, Homo sapiens
tctcaacacaataaaaatgtccgtgctacccaaagtgatctacagattcaatacaatccctatcaaaattccaatgtcatcttttcacataaatagaaaartatcctaaaatttgtagggaatcaccaaagactcctaattgccaacacaatcttgaggaaaaataaaaaaaactagagatattgttacagtaggtagcta

SEQ ID NO: 17639 - DNA, 201 bp, Homo sapiens
atgggactgagccacatcagtgatggggaactcaagtttctggggacagtgcattccattctcagtgtgttgatatgttgcagcttttattgaactgtagyctctctctctctctctaaagctttcacctaataatcctagtttaccactttaagactacacagaacaaatctaacatttccatccatattgaagcccttc

SEQ ID NO: 17640 - DNA, 201 bp, Homo sapiens
gaggctgaggcaggagaatggcacgaacccgggaggcggagcttgcagtgagccgagatcccgccactgcactccagcctgggcgacagagcgagactccrtctcaaaaaaaaaaaaaaaaaaaaattaaagaaaaaggtttgtataacttatcaatgtcagataaaatatatctcataaaatctatatagatacattaat

SEQ ID NO: 17641 - DNA, 201 bp, Homo sapiens
cataaggcaaagggataaaatgcgtaattattgttaacgaaaaacaaaacaaagacaaacacagcttaactgttcaaggtgttatattagtatatctaccmaattccttcattttaaagtcattttatgactttaaaatgtgtgtgtgcccacatacagtatattcccccaattattatgtaagtccattctgtaaatctt

SEQ ID NO: 17642 - DNA, 201 bp, Homo sapiens; identical to SEQ ID NO: 15629

SEQ ID NO: 17643 - DNA, 201 bp, Homo sapiens; identical to SEQ ID NO: 15629

SEQ ID NO: 17644 - DNA, 201 bp, Homo sapiens
ctcgtgtaatttctgcactatatatgattactcaagttgaactttaaaggatatttgcttccacaggtaggaacagaacctcatgctctgtcataatctcratattgtgagagatgtgtgctgatcccttggccccatcctctccaacagctgtggcaaataactctatattcagttctgtctgcataccagctgccacct

SEQ ID NO: 17645 - DNA, 201 bp, Homo sapiens; identical to SEQ ID NO: 15633

SEQ ID NO: 17646 - DNA, 201 bp, Homo sapiens
tccaaagtagagcagaaaagtgagcaaagcggaaaaagtaagatgacatgaagatagactggatagtaaggaggatgagaattggcaaagagacaccgtgyattccagacagtatgggtcctctacctggctgttcctgcactggctcttggagaacaacagtatttgattctttatatgccaaagatagatattcttcta

SEQ ID NO: 17647 - DNA, 201 bp, Homo sapiens
attcttcgtaaagtgatatcctattttgtggtttgtaaagaaacagcttccagttggataatttatttattgaaaatggggtagaaggccaggtgcagtgsttcacgtttgtaatcccagcactttgggaggccaaggtaggaggatcacttgagcacaggagtttaagaccagcttgggaaacatagtaagacttcatct

SEQ ID NO: 17648 - DNA, 201 bp, Homo sapiens
ataatttatttattgaaaatggggtagaaggccaggtgcagtggttcacgtttgtaatcccagcactttgggaggccaaggtaggaggatcacttgagcayaggagtttaagaccagcttgggaaacatagtaagacttcatctctaccaaaaataattagccaggtgtggtggcatgcacctatagtcccagttactcag

SEQ ID NO: 17649 - DNA, 201 bp, Homo sapiens
ttttcttaccaagatgaaatgaactcataaatcagaactttggtacatacctaaacacagatacaaatctgcgtataggagaagagggatacatactcagygtatgcagactggtgctcagatgtatcttgatatacacataaattcaagtagctatataaataagttgacatgacttattcatgtcaacttatttctgct

SEQ ID NO: 17650 - DNA, 201 bp, Homo sapiens
ctaacataaagttttaagtttatacatcatagagtttatcctttgattttataatgctttaagaaaatatgttgtggttagatccctctaaaatgcatggraagccacagatttcccaattgattcttcgtaaagtgatatcctattttgtggtttgtaaagaaacagcttccagttggataatttatttattgaaaatgg

SEQ ID NO: 17651 - DNA, 201 bp, Homo sapiens
ccctctaaaatgcatgggaagccacagatttcccaattgattcttcgtaaagtgatatcctattttgtggtttgtaaagaaacagcttccagttggataayttatttattgaaaatggggtagaaggccaggtgcagtggttcacgtttgtaatcccagcactttgggaggccaaggtaggaggatcacttgagcacagga

SEQ ID NO: 17652 - DNA, 201 bp, Homo sapiens; identical to SEQ ID NO: 15640

SEQ ID NO: 17653 - DNA, 201 bp, Homo sapiens; identical to SEQ ID NO: 15640

SEQ ID NO: 17654 - DNA, 201 bp, Homo sapiens
gctgcccaccactctcttaaaattattctcacaaaagaaactaatcaaccttgtaactgataaactcaaattccttttttcattcccatttctgatttttytacagcatctgacatttgctgaccagcttctatttccttgaaactttctctttccttgacccagttcattttccacattgccaacacttgtatttctgtg

SEQ ID NO: 17655 - DNA, 201 bp, Homo sapiens
tttaccactctcactttgataaaagttgggcctgaggaggaaccatagaatagaagatgggctgattaggatgccacattaagctcctcgacaagatggtyacacaatgctgcacagaaacaaacacacgaacagaaaaccaaacactgcatgttctcacttaggaatggcagctaaacattgagcacacatgaacacaaa

SEQ ID NO: 17656 - DNA, 201 bp, Homo sapiens
ttgttctgttgctggtaaggagctgtgatcctttggaggagaagcactctgatttttagaattttcagcttttctgctctggtttctccccacctttgtcrttgtatctacctttggtctttgatgttggtgacctacagatggagttttggtgtagatgtcctttttgttgatgctgacactattcctttctgtttgtta

SEQ ID NO: 17657 - DNA, 201 bp, Homo sapiens
tgctctgatcttagttatttcttgccttctgctagcttttgaatttgttttctcttgtttttctagttcttttaattgtgatgttagggtgctgattttaratatttcctgctttctctcatgggcatttagtgctacaaatttccctctacacactgctttaaatgtgtcccagagattctggtatgttgtgtctttgtt

SEQ ID NO: 17658 - DNA, 201 bp, Homo sapiens
cactctgatttttagaattttcagcttttctgctctggtttctccccacctttgtcgttgtatctacctttggtctttgatgttggtgacctacagatggrgttttggtgtagatgtcctttttgttgatgctgacactattcctttctgtttgttacttttccttctaatagtcaggtccttcagctgcaggtctgttgg

SEQ ID NO: 17659 - DNA, 201 bp, Homo sapiens; identical to SEQ ID NO: 15642

SEQ ID NO: 17660 - DNA, 201 bp, Homo sapiens; identical to SEQ ID NO: 15643

SEQ ID NO: 17661 - DNA, 201 bp, Homo sapiens
tttttttaaaaaatttagctggagcttctcttaactgacataattacaatgtttactttctaacactgcaattgcaaatgtgcgtaaaatccttcatattrttcttagatggtcagttcgtgcatttttaatatatgaagaaaaaaagggagagtaaaaggcacaaaattgtgtgttaaaattaacaaataagaaatgata

SEQ ID NO: 17662 - DNA, 201 bp, Homo sapiens
tgctctcctgctccttgcccttgaccccctgacaggccccagtgtgtgatgttcccctccctgcgtccatgtgttctcattgttcaactcccatttatgartgagaacatgtggtgtttggttttctgttcctgtgttagtttgctgagaatgatggtttccagcttcatccatgtccctgcaaaggacatgaactcattc

SEQ ID NO: 17663 - DNA, 201 bp, Homo sapiens
aaaccaaacaggaacaagtagggatgggtcatggtggaggcaggggggatgtggagagaaacaggcattcagacacaaatactctcctggaaagccagagyacctgaagccaaatgcccctgggctagcaccacagtcacacagccactattctgtggtttgcttttggtcaccaataaatttccttttttgttgttgttc

SEQ ID NO: 17664 - DNA, 201 bp, Homo sapiens
gcatagtattccatggtgtatatgtgccacatttttttaatccagtctatcattgatggatatttgggttggttccaagtctttgctattgttaatagtgyggcagtaaacatacgtgtgcatgtatctttatagtagcatgatttataatcctttgggtgcatacccagtaatgggattgctgggtcaaatgttatttct

SEQ ID NO: 17665 - DNA, 201 bp, Homo sapiens
tgctctatcgtggctgaattaacaagctgaggagtgaaatctccaaaactaaaattttatactggagcgacaggacccgcacgaatgagttttattagttygaggttgactgtctatttcttcccacccactttgttggcaacaacctaaaaaacaatcgtgtgatttggtggcctgagttccacatcagattgtttctca

SEQ ID NO: 17666 - DNA, 201 bp, Homo sapiens
ctccttcttcttcctcttctaaataataatcccctttctcttcctttttcacaatttccttagggtcatttaaatgaatcataaaattgtggttgtccttyaccactctcactttgataaaagttgggcctgaggaggaaccatagaatagaagatgggctgattaggatgccacattaagctcctcgacaagatggttac

SEQ ID NO: 17667 - DNA, 201 bp, Homo sapiens
acccatgcttatgtttaattcaagatacaatagtggacattttgtaattgggaatggtttggtagaggtatatggtttaccgatccaatggaaaggtttgmaatttcacacaaaacaaagcattagtaaagcaaagtatatggtgggactcaggagatctgaagtctggcctctgctagctgacaagatgttacaacaagt

SEQ ID NO: 17668 - DNA, 201 bp, Homo sapiens
aatagtgcggcagtaaacatacgtgtgcatgtatctttatagtagcatgatttataatcctttgggtgcatacccagtaatgggattgctgggtcaaatgktatttctggttctagggccttgaggaatcaccataccatcttccacaatggttgaactagtttacactcccaccaactgtaaaagtgttcctatttctcc

SEQ ID NO: 17669 - DNA, 201 bp, Homo sapiens; identical to SEQ ID NO: 15646

SEQ ID NO: 17670 - DNA, 201 bp, Homo sapiens; identical to SEQ ID NO: 15648

SEQ ID NO: 17671 - DNA, 201 bp, Homo sapiens
aatatgaacatcttaaatactattctctaactgcttgtgcatttatgctttcattggcaatttgttgcttaccagcagtcatatttgttcccaaattcatwcacatcacttatactgactagtgtaattatttaaattaaatattatatacacttatatgaacgtccaaagagagttgtttctgaggacattagttataag

SEQ ID NO: 17672 - DNA, 201 bp, Homo sapiens
tctgttttactaaatattgagtaattaaaaagtaatctagttgcttccacacaatatttctgggtactgtggtgagatgtgtgaaactgacaaaaaaggaktaaatccaggtttctagatttaaatctagatcattaaaggcatatgagaaattgagaaaagtttgtaaggcaggagaggcagcgtaatttaggggttagg

SEQ ID NO: 17673 - DNA, 201 bp, Homo sapiens
tgccatattacagaatgaaagataaaaatcacatggtcatcacaatagatgtggaaaaaacatacgacaaactcaaatatcctttcataataaaaactctyaacaaagtagataaagaggaaatgtatctcaacacaataaaaatgtccgtgctacccaaagtgatctacagattcaatacaatccctatcaaaattccaa

SEQ ID NO: 17674 - DNA, 201 bp, Homo sapiens
ttccatatatttgtgtggttttgagtgagtttcttaatcctgagttctaatttgattgcactgtggtctgagagacagtttgttgtgatttctgttctttwacatttgctgaggagtgctttacttccaattacgtggtcaattgtaaaataagtgtgatgtggtgctgagaagaatgtatattctgttgatttggggcgg

SEQ ID NO: 17675 - DNA, 201 bp, Homo sapiens; identical to SEQ ID NO: 15653

SEQ ID NO: 17676 - DNA, 201 bp, Homo sapiens
ctagctagttatcgaacccaaggaggtgattgtggaaacctccaaatgagtagtcaagtcagacagaagtgtgcatactctaggcacccaatacttgtgaytggcatctgaaaaggaagcagtcttgtgggagtgagttaatctacgaggtctgtgctaactctgggtagttagtatcagaatggaatttaattgtaggac

SEQ ID NO: 17677 - DNA, 201 bp, Homo sapiens
tggtccttgcctcatgtctttccctacttcctgaaatatgaatgtaatggctggggctgcagcaatcattttgcaactatgaagtaagcttgagcatggaratgatgtactaagaatgatggaacagataaaaagaaggaatctgaattcctgatgatgttgtggtgcttcctaccatcaactgcccacctctgacttttt

SEQ ID NO: 17678 - DNA, 201 bp, Homo sapiens; identical to SEQ ID NO: 15662

SEQ ID NO: 17679 - DNA, 201 bp, Homo sapiens; identical to SEQ ID NO: 15662

SEQ ID NO: 17680 - DNA, 201 bp, Homo sapiens; identical to SEQ ID NO: 15664

SEQ ID NO: 17681 - DNA, 201 bp, Homo sapiens; identical to SEQ ID NO: 15665

SEQ ID NO: 17682 - DNA, 201 bp, Homo sapiens
aaatgcccaactgcttagtttgaaaacccgtggaagaggattgcaccaacaaagaagaaacctgatacagaaggaagaaggaacacagcaaggcatgggcrtcttgccttgttctttgaaaagaacactagccagcaaagagagagctatttatgtttctaagttgcctctccaggaggtgggttaaaaagcagacttggg

SEQ ID NO: 17683 - DNA, 201 bp, Homo sapiens
aaggttctgaaatcttgacacagtacagtgatgaattacttcaggagagtactcatgaattagtggatataatcccaaaatgtttctgtttggagtttcarcctgtataatactgttttctatagagcatattacagctagaaggggctaagaaataatctggtctgaactttacagatgaggaaaacaaggctcagagca

SEQ ID NO: 17684 - DNA, 201 bp, Homo sapiens
gaggaaaacaaggctcagagcattaactgaactgcttgatggcatagtcgtgacaagaagccaactgacttggtgctacaccaaaccaacccttctgtgtsagcctataactggggctgctttaagagcttcagactcagggagcattgggtgcttgttaacaggactggatacttttgtgcactgttctcacaggcctat

SEQ ID NO: 17685 - DNA, 201 bp, Homo sapiens
cctacaccagatctagtgagtcagaatctgtattttaacaagatcccgaggtaattcatatgcacattaaaatttgagacgtactgtaatttatatattgkcagttatatatatatgtatattacaataaattttgtgatgaagatgaacacagtatgccatggaagaaaaaaaaagataattatcaaaactggtggactc

SEQ ID NO: 17686 - DNA, 201 bp, Homo sapiens
gaagaaaaaaaaagataattatcaaaactggtggactccagaaggtttcccaacagaactggatggaatcttaatcttaggggctctgagcaagaaaggascttggtatttttaaagaatgaagagaaatctacaatggctgaattatagtgagtttgactcagggtgagggtgaagaagcaaatggggccttatcctcat

SEQ ID NO: 17687 - DNA, 201 bp, Homo sapiens
atgcccctgggctagcaccacagtcacacagccactattctgtggtttgcttttggtcaccaataaatttccttttttgttgttgttcaagtgaatttgasttttagttctcatggctgtaaactgagaagtcctaactaatatagtagtagtgtctctgttttttttgcttgtttgtttgtttttaccaaaggggaaaca

SEQ ID NO: 17688 - DNA, 201 bp, Homo sapiens
ctcttaaatcttaaaatctatgaaattctgtttatttttcaagaccattcctcccataaagctttctccactgctttgtgttaattccttcctactctgartttctttaaactttttatatcaaaatttaattttccatttacagtggagtcatattattgtcccttatctcaagtacctcggtatctgggggtgcagtag

SEQ ID NO: 17689 - DNA, 201 bp, Homo sapiens
cagggctgactccttcttatacttgtctcaactcaactatttttttacaatgaggccttctaatctcctaatggaatgttgcccctctccccaagtcactrtccatacattgtactgttttattatgtcataatatttattacaacctgaatttatctgacttatttatttgtttacatattgtctaggtttgcccataat

SEQ ID NO: 17690 - DNA, 201 bp, Homo sapiens
tcctggttgcctcaagtactgtgctgaaaagacttccgcagtctcactccatttcaagaggagaataagcagtgtttggttagtgctgactgcccaggctkcaggaggtctgagacgcaacctaatagccaccaatttctgatccctgatttctccccatcacatttataagtcattgttccagccttaatctttggttta

SEQ ID NO: 17691 - DNA, 201 bp, Homo sapiens
atgttgtggtgcttcctaccatcaactgcccacctctgacttttttcacgttaggaaaataagcccctttttaatacaagcactgatttggaggttttctrttaaatgtagctgaactcaatcctccctgaaatacttttcatttttaagtgcttattgcactaaaaaacttaagttttgcaaaatattttacatttaatc

SEQ ID NO: 17692 - DNA, 201 bp, Homo sapiens
cagacaggcatgaccaaaatacaaacttacttaaacaactttcacttcccattaaaagtttcttatctctactgcctcactggattcactcatcgatctayggcagtctggctgctgcccaccactctcttaaaattattctcacaaaagaaactaatcaaccttgtaactgataaactcaaattccttttttcattccca

SEQ ID NO: 17693 - DNA, 201 bp, Homo sapiens
taattatatgtttcactcttcttcaaaaaactttcactggcttgccattatatacctataagttaaaacttgaaattgttaatgtttcaaaatttaaaaartttgtatagataatacaggcatatgtacacagtttaaagaacactcaagagtatgtaataatgaagtctccatctcatcctataccccatctctcaatct

SEQ ID NO: 17694 - DNA, 201 bp, Homo sapiens
tatatgtttcactcttcttcaaaaaactttcactggcttgccattatatacctataagttaaaacttgaaattgttaatgtttcaaaatttaaaaagtttktatagataatacaggcatatgtacacagtttaaagaacactcaagagtatgtaataatgaagtctccatctcatcctataccccatctctcaatctcctt

SEQ ID NO: 17695 - DNA, 201 bp, Homo sapiens
gagaagccatgcaaatgtgtacaatagatagtttcatgagtactgctacatagtcaacaaatatatctggcttcttttctctttgacaagacagctggagytgaaatccccagctaggactaaaaggaaaccaaaccatataatgcttagagcacattcctcctgtgaattataagaaccttgaaagtttatgactgtgtt

SEQ ID NO: 17696 - DNA, 201 bp, Homo sapiens
tttcatgagtactgctacatagtcaacaaatatatctggcttcttttctctttgacaagacagctggagttgaaatccccagctaggactaaaaggaaacsaaaccatataatgcttagagcacattcctcctgtgaattataagaaccttgaaagtttatgactgtgttctgcattaagttccagaatatttattagtat

SEQ ID NO: 17697 - DNA, 201 bp, Homo sapiens
aatatatctggcttcttttctctttgacaagacagctggagttgaaatccccagctaggactaaaaggaaaccaaaccatataatgcttagagcacattcytcctgtgaattataagaaccttgaaagtttatgactgtgttctgcattaagttccagaatatttattagtatatcagaatcacctaaagcacattgaggg

SEQ ID NO: 17698 - DNA, 201 bp, Homo sapiens
gcttagagcacattcctcctgtgaattataagaaccttgaaagtttatgactgtgttctgcattaagttccagaatatttattagtatatcagaatcaccwaaagcacattgagggcctagagagctttcttgcttaggagaggaagaggatctatctaatggtcaaatgggtttcctcaagagacagtgatgtcatcaca

SEQ ID NO: 17699 - DNA, 201 bp, Homo sapiens
actaattagaacacattattggattagcttacctccatgtcttttcaaagaaatctttaccaaatgtgtctggtgggcattttggaggcgtagccaaagaytgcttgaataaatcagttaggtgagctgcaactttaaacatagatgtatttaacttttatccccacttctttatagggcaacacacaatcagtacacaat

SEQ ID NO: 17700 - DNA, 201 bp, Homo sapiens
aagaggagaaaaatctggataaacaacaacaacaataaaaacaactgtacaagcccacactgtggaggatactcagaacctatctgtgggctgaatgaagygcatggctgccagtttatgatctttgccatatcgccaacaaaacaaaacaaaaacgcaccaaattcctactgcttgtttgctgtgagctatgaaaccatc

SEQ ID NO: 17701 - DNA, 201 bp, Homo sapiens
cacactgtggaggatactcagaacctatctgtgggctgaatgaagcgcatggctgccagtttatgatctttgccatatcgccaacaaaacaaaacaaaaaygcaccaaattcctactgcttgtttgctgtgagctatgaaaccatctaaccacatttgttagggctgtgtatatatacctccaaatgaatattctttgaat

SEQ ID NO: 17702 - DNA, 201 bp, Homo sapiens
gaagcgcatggctgccagtttatgatctttgccatatcgccaacaaaacaaaacaaaaacgcaccaaattcctactgcttgtttgctgtgagctatgaaaycatctaaccacatttgttagggctgtgtatatatacctccaaatgaatattctttgaatgagatctaagagtaaactacttgcactacatacagtgtaaa

SEQ ID NO: 17703 - DNA, 201 bp, Homo sapiens
gagggcaggctgttggttggttgactgtttccttcctatatcttcattatagttgaggctaacataaaagtcaaatgtcaacatttttcacttaatggatkaaagttaaagatgaatgagagaaaatcatggttttctaggatgtcaaagctcaggcagaacaatacaggcagaatgacttacaaatataaaccaccacaa

SEQ ID NO: 17704 - DNA, 201 bp, Homo sapiens
caatgtctttggggcttcttaataatttctacaccttatgggaaccattaaatattttctacctctcaaccctctactctgaaagactgacatccttgtgytgcactagacaaatattggtagaattacataatttcaggtttcttaggaaaccaaaagcaatgattgctctgtttctgattcttttgggtcaggtcacct

SEQ ID NO: 17705 - DNA, 201 bp, Homo sapiens
tctttttccctctctgtgaaccctactttatgtgcctcaaaaagatcctgctctagactacagcaacaactggttttgccacctatatatactctgtgaakgaaccttcccttgcagtcagggtgactgattatgttagtccatgatgaaaactcttttttgccttcacatcgctcatgagataaaagatggtccttaaca

SEQ ID NO: 17706 - DNA, 201 bp, Homo sapiens
tcttacttaatgttttatgtatctctaacctctggcaaacaccaatttctttgaagttgatgaaaacaatgtaagtacccaatgaatgtagcttatataasttaccgggtatttcaggttggcattataactcacctatcaatttcatcaaagcaatatcttcaaaatgacaaaaaatgaatttacaagagatatctcact

SEQ ID NO: 17707 - DNA, 201 bp, Homo sapiens
tacttagcaaagaaaaaataagctggatcagggcttatctacatatcaaaacaaagttaggaattctgttgtataactccaaatctaaaaaataacttcayacctactagctgatagacaaaatttcactgttgaatgagaagtaaaaaaaaaaaaaaaaagaaaagaaaaaagataaatgcctagagcaatggttggcaa

SEQ ID NO: 17708 - DNA, 201 bp, Homo sapiens
aaccatttacgcatatatgaaaccatttttagttcatgggctatagataaacaagtggccatagtttgccaattcctgacctagaggtgaggggatagtcrtggtgttgaaagacaaagaagcaaatattttctcccattctgtaggttgtctgtttagtcagttgatagtctgttgatagtttcttttgctgtacagaag

SEQ ID NO: 17709 - DNA, 201 bp, Homo sapiens
ccatttacgcatatatgaaaccatttttagttcatgggctatagataaacaagtggccatagtttgccaattcctgacctagaggtgaggggatagtcgtrgtgttgaaagacaaagaagcaaatattttctcccattctgtaggttgtctgtttagtcagttgatagtctgttgatagtttcttttgctgtacagaagct

SEQ ID NO: 17710 - DNA, 201 bp, Homo sapiens
ttcaagggtttttgtagtttaggttttacatttaagtctttaatacatcttgagacaattgttgtatatggtgtaaggaaggggtctagtttcaatcttcygcatatagctagccatttatcccagtaccatttattgactagggagtcctttcctcattgcttgtttttgttggttttgttgaagatcagatgattgcag

SEQ ID NO: 17711 - DNA, 201 bp, Homo sapiens
gtctgttcatatcctgtgcccactttttgatggggttgtttttttcttgtaaatttgtttaagttctttgtagattctggatattagccctttgtcagatragtagattgcaaaaattttctcccattctgtaggttgcctgttcactctgatggtagtttcttttgccgtacagcagctctttagtttaattatatctca

SEQ ID NO: 17712 - DNA, 201 bp, Homo sapiens
ccatgctgttttggtaactgtagccttgtagtatagtttgaagtcaggtagcatgatgcctccagctttgttctttttgcttaggattgtcttggcaatgygggctctttcttggttccatataaactttaaagtagttttttccaattctgtgaagaaagtcattggtagcttgatggggatggcattgaatctataaat

SEQ ID NO: 17713 - DNA, 201 bp, Homo sapiens
gattttttgaagggttttttgtgtcgctatctctttcagttctgctctgatcttagttatttcttgccttctgctagcttttgaatttgttttctcttgtytttctagttcttttaattgtgatgttagggtgctgattttagatatttcctgctttctctcatgggcatttagtgctacaaatttccctctacacactgc

SEQ ID NO: 17714 - DNA, 201 bp, Homo sapiens
ctagcttttgaatttgttttctcttgtttttctagttcttttaattgtgatgttagggtgctgattttagatatttcctgctttctctcatgggcatttartgctacaaatttccctctacacactgctttaaatgtgtcccagagattctggtatgttgtgtctttgttctcattggtttcaaagaacatctttattgct

SEQ ID NO: 17715 - DNA, 201 bp, Homo sapiens
tttctcttgtttttctagttcttttaattgtgatgttagggtgctgattttagatatttcctgctttctctcatgggcatttagtgctacaaatttccctytacacactgctttaaatgtgtcccagagattctggtatgttgtgtctttgttctcattggtttcaaagaacatctttattgctgcctttattttgttatt

SEQ ID NO: 17716 - DNA, 201 bp, Homo sapiens
tatgttgtgtctttgttctcattggtttcaaagaacatctttattgctgcctttattttgttatttactcagtagtcattcaggaacaagttgttaagttyccatatatttgtgtggttttgagtgagtttcttaatcctgagttctaatttgattgcactgtggtctgagagacagtttgttgtgatttctgttctttaa

SEQ ID NO: 17717 - DNA, 201 bp, Homo sapiens
tcttcagtcacttataccctttcttccacttgatcaaatcagctattgaagcttgtgcatgtgtcatgaagttctcatgtcatggttttcagctccatgargtcatttaatgtcttctctacatggtttattctacttagccattcgtctaagcttttttcaaggtttttagcttccttgcgatgggtttgaacatgttcc

SEQ ID NO: 17718 - DNA, 201 bp, Homo sapiens
ctaggaaagggaaatcccctgacaccttgcacttcccaggtgaggcggatgccctgccctgcttcatcttgccctccgtgggctgcacccactgtccaacyggtcccagtgagatgaaccaggtacttcagttggaaatgcagaaatcacccatcttctgtgtcgatcacactgggagctgcagattggagctgttcctat

SEQ ID NO: 17719 - DNA, 201 bp, Homo sapiens
aagggctactcgataaagaggcaaactgaatagttaggatatcatttctcctgtatcctcatatcttatctgctcgctttaatatctcttctaactaattstcttatgcccccttatttctaatatttaacatattttagctgaggttacatacatgtttggccctattcatcctattctaaatgtttggggttgctcatg

SEQ ID NO: 17720 - DNA, 201 bp, Homo sapiens
aagtgctcttagaaactcatctctcctctctctggtggctgacacggtccttaagtaatagacttcatgtaatgaattctggttcaaacagatctttttcygaaatataatttacatatcatagatttaccctttaaaagtgtataattccgtgggttttagtatattcaaaaatgtgtgaagccattatcactaattccg

SEQ ID NO: 17721 - DNA, 201 bp, Homo sapiens
tcaaggttcactcatgttgtagcacacagtactttattccattttatggataagtaatattccattgtatggctatatcagattttctttattcacttatragttgccatcatttgcattgttttcagttttgctattattaaagatgttgctgtaaatattgtgtacaagtttttgtgcagatgtatgttttctcttgga

SEQ ID NO: 17722 - DNA, 201 bp, Homo sapiens
gtacatgagaccattatcagttatatgattttcaaataacatcttctattctgtagtttatcttttcacgttcttggtggtgtcctttgaatcacaaactkttttttgattttggtaaagcttgtatgtttggcatcatatctaagaaactattgcctaatcaaaaacatgaaaatttatatctatgttttctttcatctc

SEQ ID NO: 17723 - DNA, 201 bp, Homo sapiens
aaagggatgaataaataagagtttgagaagtatattctaagatgttagtattataagagaatgaaagcaacagcagtgtacattgcaggcatttttactgmcccagagaagtgggttttctcagctgaatagacactcatctttggcgcttctcattttcctcgtagacctacctggtatgttccctgtggctttgcaata

SEQ ID NO: 17724 - DNA, 201 bp, Homo sapiens
aaacatctgaaagctagtatctaggacagatgaatatggttattaggttttagttgccaccaatcaaagactattactaaccatcagctaactagagctgytatcactcccatctctgttgagataatgatcataataaaaggtcctaatgcatcctcatattcattgcagcattattcacaaaaaccaagatttggaatc

SEQ ID NO: 17725 - DNA, 201 bp, Homo sapiens
aaatttctaagagagtagattttaagtattctcacaattaaaaatgataagtacaaagaacaaagctggaggcaaccgtaaccgtgctactcaactataarctatactacaggactacagtaaccaaaatggcatggtacttgtaccaaaacagcaaaacagacacatagaccaatggaacagaatagagagcccagaaat

SEQ ID NO: 17726 - DNA, 201 bp, Homo sapiens
aaactgcaccccttccttacaccatatagaataattatctaaagatgaattaaagaataaaatgtaaaacccaaaattataaaaaccctgaaagacaaccyaggcaataccattctagacgtagcaacaggcaaagatttcatgacaaagataccaaaagcaattgcaacaaaagcaaaaattgacaagtgagatctaatt

SEQ ID NO: 17727 - DNA, 201 bp, Homo sapiens
aaaagcaattgcaacaaaagcaaaaattgacaagtgagatctaattaaaacaaagaaattctgcacagcaaaagaaactatcaacagactaaactgacaasctacagaatgggagaaaatatatacaaactatgcatctgacaaaggttcatacatgctaacatccagcatccgtaaggaatttaaacaaattagcaagca

SEQ ID NO: 17728 - DNA, 201 bp, Homo sapiens
tgacaacctacagaatgggagaaaatatatacaaactatgcatctgacaaaggttcatacatgctaacatccagcatccgtaaggaatttaaacaaattarcaagcaaaaaaccaaacaaccccattaaaaagtgggcaaaaaacatgaacagttttcaaaagaagacataaacgtggccaaaaaacacatgaagaaaagc

SEQ ID NO: 17729 - DNA, 201 bp, Homo sapiens
aagtaacagatgctggccaggttgcagcaaaaaatgaatgcttatacactgctggtgggaatttaaattagttcagccactgtggaagacagtgtggtgaytcttcaacgacctgaatacagaagtactattcgacccagcaatcccattactgggtatatacctaaaggaatataaatcattttactgtagagacacata

SEQ ID NO: 17730 - DNA, 201 bp, Homo sapiens
tgttcactgtagcactgttcacaatagtaaagatatggaatcaacctaaatgcccatcagtggtagactggagtaagcaaatggcatacatatacaccacrgaatactatgcagccataaaaacaaacacgatcacatcctttgctggaaaacgcatggagctggaggccattacccttagcaaactaacacaggaagaga

SEQ ID NO: 17731 - DNA, 201 bp, Homo sapiens
ccccagatggggtgaactgcaagatggcctgcaagtgtcgggctaatgtcatcagagcagtacttgaagattggtaggggacagaggctgtagcctctctrtgtcaagttgacctgtgcatgtatctgctgctcagtgccgctgcatgcctgtgagcttgaggggtatgagaagcggtgtgcgtgggttgctgctcctgag

SEQ ID NO: 17732 - DNA, 201 bp, Homo sapiens
agccaacactagtatcttcttggaaatgttatgtgggttaaacgagatgatgctggtaaagtgcgtcacacttggccatcatgttagtaattattgatagyggttttttatctagtagagatatttacatattatgatttagaattattgaaacatttcgtaacgccacataaacagtgacattttctggtcaccatagaa

SEQ ID NO: 17733 - DNA, 201 bp, Homo sapiens
attgtgggacttaggcagaaatgaatgccagaacctgcacaatctggatggaaggtttgatatgaggccctcaaatgactacactctcagactaagtgtgrattattaacagaaatcattcgtgtcctttcccaccccactctagaactgtcagaaagcttgcctgtgttcaaacttggtgctgagcagagaaaacaagaa

SEQ ID NO: 17734 - DNA, 201 bp, Homo sapiens
ggtgacagagtgagaccatgtctcaaaaaaaaaaaaaaaaaatgcacttttataccagctcaagaatttagaattaaagcaataagaaaaaattatcatcycatagtcaaaaagtaccgagacacaatgaaacaaggcaattcaagtgagagccagaagaagcaacagaaaatggaattagatctataatactttagatat

SEQ ID NO: 17735 - DNA, 201 bp, Homo sapiens
agatttagcaggagacaaaacacagcttaaaagagaactgaaagacctaaagtaattgtttagaatgaagctcagagaaccaaagcatagaagtaaaaaawaaataaataaaagttcaaggcctcttaaatatgtttaactggaattccagaagcagagaagaaaaaagaaatggatcagaaacaatatttgaagagataa

SEQ ID NO: 17736 - DNA, 201 bp, Homo sapiens
cactctggggggccaaggcaagcggatcactttaggtcaggagttcaagaccagcctggccaacatggtgaaaccctgtctctactaaaaatacaaaacamaacaaaacaaaaattagccagctttgatggcacgtgcctgtaatcccagccacttgggaggctgaggcacgagaattgcttgaatgtgggaagtggaggt

SEQ ID NO: 17737 - DNA, 201 bp, Homo sapiens
aagctctgtgcaaacttcttatgttatgtctttgattcttttctcccttcattcttactatttttttcttctggaaattatatcatatggaccctttttcsatatctctcagcttttctcaccctcaaaatctaccccttcccatttttgatcattcacaattatttctaatttctaagaactcttgatatttttccttag

SEQ ID NO: 17738 - DNA, 201 bp, Homo sapiens
cttttctcccttcattcttactatttttttcttctggaaattatatcatatggaccctttttccatatctctcagcttttctcaccctcaaaatctacccyttcccatttttgatcattcacaattatttctaatttctaagaactcttgatatttttccttagcgactttttaaaaagttgttattttatgaactgttaa

SEQ ID NO: 17739 - DNA, 201 bp, Homo sapiens
tgtagtgtctactcacaggagctcctgttttgtgatcactggggaaggaaagagcagggcatatggcttctgatttttaaggtttctcgttcccatcctcygggtgacagtgagttacctggggaactaccctcattttctgagctcagagatccatgtgcaaaatgtttgtgttagaattcccatttcgatgtttaattt

SEQ ID NO: 17740 - DNA, 201 bp, Homo sapiens
gatgacatgccttgttgtcctccagtaccattatgaattcactatttaaatttttaaaattagtttaagatagcttgagagggagaaaaggaaaaaactgktcagtttgcaatcttacatcatgcagagaaatgacaagtttatttgtatcctgctctgcatatagtgttttttaattctaactatattatttatcatttg

SEQ ID NO: 17741 - DNA, 201 bp, Homo sapiens
cctgctctgcatatagtgttttttaattctaactatattatttatcatttgtcatttgaaggtgtcattcctttttctagtgagttgttccttttccctgktatagaacagttccttacccataagttgtcttttactttggaacagggaagaataatttctctaacacattcttttacctgtgtggatccatccaacata

SEQ ID NO: 17742 - DNA, 201 bp, Homo sapiens
ttaaaagaattggccaggcatgatggtacatgcctgtggtcccagctacttgggatgctgaggtggaatgactgcttgagcccaggagtttgagcccacastaccatactccagcctgagtgacagagcaagaagtccatcttaaataaaataaagtaaaataaaataagagaaacaggctcttaccagacataaaatctg

SEQ ID NO: 17743 - DNA, 201 bp, Homo sapiens
tcccagctacttgggatgctgaggtggaatgactgcttgagcccaggagtttgagcccacactaccatactccagcctgagtgacagagcaagaagtccaycttaaataaaataaagtaaaataaaataagagaaacaggctcttaccagacataaaatctgctaatatcttgatattggacttcacagcctcttgaactg

SEQ ID NO: 17744 - DNA, 201 bp, Homo sapiens
tcttttgatctttgttttattagatctttgtttagagtcaaagtgtgtgtgtgtgtgtgtttactatgatgaagggctaggggtaataggaggactactcyttttttttttttttttttttttttgaggactactctttaatcagaggtgggctgttagtcttgttagattcttagcacatcaatatctaagaccaacttt

SEQ ID NO: 17745 - DNA, 201 bp, Homo sapiens
tatatttttcttccatttgttatttatcacagtggagctaaacaaagtattaaaaataaggaatggcagaaacttgaccaacgaaaagcaaagaaaacccmagaaatagagtggaaaaaaggttgaactaagtttttccaaacttagaatgaatgacctgagacaacttatgtatgacaatatgtctcctggagtggtaac

SEQ ID NO: 17746 - DNA, 201 bp, Homo sapiens
ccagcactaagacagatattattgctctatttatgttttccttgttcattagacagtgagttctttgtgtagatgtaccacgaattaattcatcttagtgrctcagtgccagcaagttgcttgacccacagaaagtacagtatataaacaagtgaatggcgttcagtttcaggcatctggaaattcccctcctcatcccca

SEQ ID NO: 17747 - DNA, 201 bp, Homo sapiens
ttcaaaataaatataactaagactcagtgggaaggctgggaatggagttcatagctgctctaccacaatcaacttaaaaaataattggtttagcttgaccwtgcactcagggttgttagaggtagggtggaattacaaagacaagaatatgaaactcttgttttagggaccttaggttaaagtgaagagaggaaatcaatc

SEQ ID NO: 17748 - DNA, 201 bp, Homo sapiens
tctgggtgataatgatatgttaatgtaggttcatcaactgtaacaaatgtaccgctctgggtgaggcatgttaatagtggaagaggctggacatgtgtacrggaagagggcattgagaaatctctgtaacttctgttcaatttcatcatgaacctaaaactgctataaaaaataaagtctggtaaagaaaaaagataacgc

SEQ ID NO: 17749 - DNA, 201 bp, Homo sapiens
ggtgataaaataatatgcataccaaagccctgcgatacacaatttacctatagaaccaacctgaatagatatccctgaaacgaaaataaaaaggcagcatmgaatataaaaccagggagaggaaatgcttagagatgtcacctctataaaagaatgcctaaggaaataaagtaatggtggaattccaggcatgaatggcag

SEQ ID NO: 17750 - DNA, 201 bp, Homo sapiens
ggaaatgcttagagatgtcacctctataaaagaatgcctaaggaaataaagtaatggtggaattccaggcatgaatggcaggtagaccaaggaggtatttrcaggccttctagtcacatttcaaactcaatttcagaagagaaaatgaactggctgaggcaatgtatgcctataatcaatgttatgattcatcaaatgata

SEQ ID NO: 17751 - DNA, 201 bp, Homo sapiens
cattattatgtttccaatcattaaccagttgctttcaaaatgtacctttttcaaacattgtcttttccacttcaatctgccccccatcagaaggatacagrtagtaatttgaccctgagatttgagtgggtatatttcccatattgtatccgtgaaactagaagagaaaatattatgctttgagtgtgaagctgcaataga

SEQ ID NO: 17752 - DNA, 201 bp, Homo sapiens
tttaccagcacaccgctgaatgttttcagagcagctagagagaaaagatgaactgtccactttgggaggccaaggcgggtggatcacaaggtcaggagttygagaccagcctggccaacatggtgaaaccccatctctactaaaaatacaaaaattagctgggtgtggtggtgggcgcctgtaatcccagctactcgggag

SEQ ID NO: 17753 - DNA, 201 bp, Homo sapiens
aaccccagtaaaagaacttctagagcaaatactcccagaacataaagaagaaatgcccaagaaaacaaatggtaagcacggagacaaagttaaaacaacayggactatataaaacaattacaatgaggccaggcacggtggttcacgcctgtaattccagcactttgagaggccctggaggaggtttgcttgaggccaggg

SEQ ID NO: 17754 - DNA, 201 bp, Homo sapiens
ctttttgttaaaaaattaatgaaactaagtttgtttctcaaaaagataaacatgatgaacaaacttttagctaaactaaaaaaaagagagatgactcaaayaaataaaattggaaataaaggaggagacattacaaatggtaccaaagaaatacaaaggatcagccgggcgcagtggctcacgcctataatcccagcactt

SEQ ID NO: 17755 - DNA, 201 bp, Homo sapiens
gagacattacaaatggtaccaaagaaatacaaaggatcagccgggcgcagtggctcacgcctataatcccagcactttgggaggccaaggtgggcagatcmcaaggtcaggagttcgagaccagcctagccaatatggtgaaaccctctctctattaaaaatacaaaaatttgccaggcatggtggtgtatgcctgtagtt

SEQ ID NO: 17756 - DNA, 201 bp, Homo sapiens
caacattaccctgataccaaagctagacaaggacattacaagaaaataaaatgacaggccgttgtccctggtgatgttagatgcaaaactcctccaaaaarttctagtaaactgaattcaacagcacatttgaaaggctcattcctcatgattaagtgtgatttattcctgggatgcaaagatgattcaacctattcaagt

SEQ ID NO: 17757 - DNA, 201 bp, Homo sapiens
ttgggtgagtgggctcaaatatgtgcattaagaggcaaaatagtggagtttaactggtatatgacctttctctaggaatgctagactggtaagggaagaaygcctcaagtaagcatgtgtacaactctagaaaccatactgtgcatgctcccctcccaagtgctagcaggccaccgcacatgtggacagccccaccccaag

SEQ ID NO: 17758 - DNA, 201 bp, Homo sapiens
gtggagaaaagagaaccatggtacactgatgatgggaatataaattactacagccactattgaaagcagtatggcggcttctcaaaaattagaattagaamtaccatatgatccagcaatcccactactgggtatatatctaaaggatttgaaatcagtatcctgagaaggtatctgcatgcccatgtttattgcagcatt

SEQ ID NO: 17759 - DNA, 201 bp, Homo sapiens
tggagaaaagagaaccatggtacactgatgatgggaatataaattactacagccactattgaaagcagtatggcggcttctcaaaaattagaattagaaayaccatatgatccagcaatcccactactgggtatatatctaaaggatttgaaatcagtatcctgagaaggtatctgcatgcccatgtttattgcagcatta

SEQ ID NO: 17760 - DNA, 201 bp, Homo sapiens
caatatatgatatggtttatatattatatatagtataatataatataacataatactattataatatataaactatataatatatactattataatatatraactattataatatataaactatatataatatataatatgtactattataatatataaactattataatataatatataaactattataatacataaact

SEQ ID NO: 17761 - DNA, 201 bp, Homo sapiens
gtataatacaatataacataatactattatatataaactatataatatatactattataatatataaactattatatatataataaacatacacacacaakggaatactattcagcctttagaaagaagaaaaatctgttatttgcagcaacatggataagcctgggggacatgacattaagtgaaataagccagggacag

SEQ ID NO: 17762 - DNA, 201 bp, Homo sapiens
ctctcactttggctataataaatgaatattattaacaaggagtccatttcctttgcacaaacttaatgaaacatgattattttctagatgaattatctcawcgtttcacttcttttctttatcaagtatctttctaaaagtctattttactctctttgtcaccatcttccccttctgcccacagcctcaaggccacaataa

SEQ ID NO: 17763 - DNA, 201 bp, Homo sapiens
ataatgagtttgaatacatcctagatgtattttgtacaaaatagtcaaatacaaatatccagtgaacatatgaaaactgcccttcatcaacagttaaagayatgtaaatttaaaaatgagatctttcatctgactcactaggctttgggtttaagaaataaaaaaagaaataagatctttccactgaagtgaaggattaat

SEQ ID NO: 17764 - DNA, 201 bp, Homo sapiens
taccaagagttaatgacagtttgaagagatgatcactttcaccactgttagttggagaataatacaatgcaatctcttttttgggcaattttatagcacaytaggaacttttaaaattgagaccaattaatactcactggattaactaaaccactatagctttgctatgaaactcactgaccttatgaatatgaacatctt

SEQ ID NO: 17765 - DNA, 201 bp, Homo sapiens
atctcaaactcaacatgtccccaaatgaactctggatctactccaacctgcagcatccaaattctctggcatttttagttgatggcaagtctacagttccrgttaaacaggtcaaataccctgatgttctccttgattactcttattttctattttctttcttttttttttttgagactgagtctcgctctgtcacccagg

SEQ ID NO: 17766 - DNA, 201 bp, Homo sapiens
tctaagccattaccatctcttgctaggatttctgcaatagcctccaactggtttccctgctcctaccctgggcccccaaagtatattctcaacatagcaaygagggtgatccttgtaactcttaatcagatcatgtctttcctctgctcagacctttttaatgagtctgcatgtcaaataaaaatcagaatacttacaagt

SEQ ID NO: 17767 - DNA, 201 bp, Homo sapiens
caccattacagtattagagtatcctgaatttgactgtatacttgcctttgcctgtaagttttatgcttttataagttttcacattgctatttagtgttttycatttcaacttgacaactccctttgagtatttattgaagggcaggtctggtggtgatgaactccctcagcttttgtttgggaaagactatctctccttca

SEQ ID NO: 17768 - DNA, 201 bp, Homo sapiens
gtagaaaggtgcagccactatggaaaataccatagaagtttctcaaaaattagaaatagaacaaccatatgatccagcaatccctcttttgagtatatatrcaaaaaaaattgaaatcagcatcttcaagaattatctggacccccatcttcattgcaatgttttccacagtagccaagataaaaaaacaacctaagtatc

SEQ ID NO: 17769 - DNA, 201 bp, Homo sapiens
agtagccaagataaaaaaacaacctaagtatctgatgatagattttaaatatgtggtatatatgatagaatagcattcagccttaaaaaggaaggaaatcytgccatttgtgacatgtataaacctagaggatattatgctgagttaaataagccagtcactgaatgacaaataccggctgattccacttatacaggttat

SEQ ID NO: 17770 - DNA, 201 bp, Homo sapiens
aaaagagaaaataaaaggacaaaattaggtggttgaaatcaatctaaaaatatgtactaaattctcaaccaagaggaaaatactgtcagactaaatttttwaaaaaatcccaggtacacatattattttacaaggcatatatgggtggaaaaggatatgctagatataatattaaagaaaaggccgggtgcggtggctcat

SEQ ID NO: 17771 - DNA, 201 bp, Homo sapiens
ggcgcctgtagtcccagctacttgggaggctgaggcaggagaatggcacgaacccgggaggcggagcttgcagtgagccgagatcccgccactgcactccrgcctgggcgacagagcgagactccgtctcaaaaaaaaaaaaaaaaaaaaattaaagaaaaaggtttgtataacttatcaatgtcagataaaatatatctc

SEQ ID NO: 17772 - DNA, 201 bp, Homo sapiens
gaatactatgcagccataaaaaatgaagagttcatgtcctttgtagggacatggatgaaactggaaaccatcattctcagcaaactatcacaaggacaaaraaccaaacaccgcatgttctcactcataggtcggaattgaacaatgagaacacatggacacaggaaggggaacatcacactttggggcctgttgtggggt

SEQ ID NO: 17773 - DNA, 201 bp, Homo sapiens
acttaaagtataataataataaaattaaaaataaaataaaataaaataaaaaaagaaagataataaaaatactatcagtcagatactttgaggtgttgctwaggcggtatttagggagggatttggccttaaatgctaataaggaaaaagccaacaaaaactaacaaaaaacaactcaaaatcacaagataggattttaat

SEQ ID NO: 17774 - DNA, 201 bp, Homo sapiens
tttaacaacatcctcactagattccacgagggcaagaatgacacctgttttctttagtggtatagctccaatgcccatacagtgcccagcacatgctgacrttcaatttagtgagctgaattgaatctatagtactacacaaatgttttcattgagctgaaccccctagcttagggtaaggaactaacacctaagtaacta

SEQ ID NO: 17775 - DNA, 201 bp, Homo sapiens
ttctttcctagctgctagaaggtgagagcataaatggtagctagcttgggaagcatttcagcaacactttagaaaaacaaatactaggcatcaggcagagmggcgcttgctacaagtgttcttcattaaggttggtaggtaataattaagcacagcagtcatttatctagcattttccatgccttgatatagaccatctaa

SEQ ID NO: 17776 - DNA, 201 bp, Homo sapiens
ggcagagcggcgcttgctacaagtgttcttcattaaggttggtaggtaataattaagcacagcagtcatttatctagcattttccatgccttgatatagaycatctaattttatcatcatttaaaactccacataaatagatgctatgaattaaattgtgttcaccatccctatttatatgttgaagccttaactgctagt

SEQ ID NO: 17777 - DNA, 201 bp, Homo sapiens
taagagctccactgaaacagggtccatgcctgttttagttcaccattgtattcctaacacccagccagtgtttagtacatggtggtttgccaaatagaggytagttaaatgactaacaaaccaatgtgagatgaattcttattctcccacagttccatacatgcaccacactgactgggggtcagtcagagtcccccatat

SEQ ID NO: 17778 - DNA, 201 bp, Homo sapiens
cactgcaattgcaaatgtgcgtaaaatccttcatattgttcttagatggtcagttcgtgcatttttaatatatgaagaaaaaaagggagagtaaaaggcayaaaattgtgtgttaaaattaacaaataagaaatgatagaaggaaagatttctgtatgatataatatcagtaattccatgacagaggtgtaacctggctta

SEQ ID NO: 17779 - DNA, 201 bp, Homo sapiens
aaacaaaacacatataatccctgtactgagggagttaacaaacttgagatgttatagacatgatcatacaattaactatatatttacaaattcttagaccrcttccaaaggcttttactctgtggacaaatatattaatatgtagttctgtctttttccagtggtcactatatcagttttctatacagtgacaaagatgga

SEQ ID NO: 17780 - DNA, 201 bp, Homo sapiens
accgtattttcccaaaacaattaggaatagcccaaagagactaagttttacagaattggagtttaccgggtaagttatcttaggttctggttggtgggggsactcttctgttacttcttggatcttgacttgttcttctttagatttctccttgtaaggtgattttttcttcaaagacctactatcctctttctctgcgtt

SEQ ID NO: 17781 - DNA, 201 bp, Homo sapiens
cagtctactgtggctatactgaacacttcacctttccataaatggaaaagcctttctatgcttttacactactggacttttacacatgctattcctggtakctagaattccctcccttcaattttttgcataggcaattctcactcacctccaaagactcagttcacatgctactgccacttgctctgggaagcatttctc

SEQ ID NO: 17782 - DNA, 201 bp, Homo sapiens
gtcaggtacaatgctgtgtgttcagtctgtgatagaggaaatactgagtgccttaggaacccagaagaagggtatctactgcaaaatgtccttgtacagtmtactgtggctatactgaacacttcacctttccataaatggaaaagcctttctatgcttttacactactggacttttacacatgctattcctggtagctag

SEQ ID NO: 17783 - DNA, 201 bp, Homo sapiens
ctgtttatgtataatttccagcactaagacagatattattgctctatttatgttttccttgttcattagacagtgagttctttgtgtagatgtaccacgawttaattcatcttagtggctcagtgccagcaagttgcttgacccacagaaagtacagtatataaacaagtgaatggcgttcagtttcaggcatctggaaat

SEQ ID NO: 17784 - DNA, 201 bp, Homo sapiens
tatctttcaagaatgaagacaacataaagacattttaagaaaatatttggtatataataaacggactaaaacatctaaagacaagtcccagctactctagwggctgagatgggaggatttcttgggcccaggaggttaggctgcagtgagctgtgatcatgccaccacactccagcctgggtgacagagtgagaccatgtc

SEQ ID NO: 17785 - DNA, 201 bp, Homo sapiens
ttatctttcaagaatgaagacaacataaagacattttaagaaaatatttggtatataataaacggactaaaacatctaaagacaagtcccagctactctastggctgagatgggaggatttcttgggcccaggaggttaggctgcagtgagctgtgatcatgccaccacactccagcctgggtgacagagtgagaccatgt

SEQ ID NO: 17786 - DNA, 201 bp, Homo sapiens
aaaaggtgagctatggaaagggcattccaacataaggaacataagaaatacaatggggtaaagaatagcatggtatacacagacaactactagcagaccartgtgaccagatgatacatttcaagcagattttggttgagtgaagggacaggagaggcaggcactgattcaattgaggggactttagcagtacgttagaga

SEQ ID NO: 17787 - DNA, 201 bp, Homo sapiens
gtcaattaaaagaataaattaaattttataaagcaaatatcaaaataagtaatgatgataataataatactactaaatccttatagaccctgctttggatkgcatgggttttctttagttggctaactttaccaaaaaattatttttcttatgtgtatgttcagcagtcagtgaggattctatctaacttacgctaaagag

SEQ ID NO: 17788 - DNA, 201 bp, Homo sapiens
taatatgatatgcatgattttgtgggtggggtggggagatgtaggtcaaagcatataaagttacaattatacaattatgtaagatgaataagtataagaaygtaatgtatagcataaaaactatagtcaataacttgtattgtataatgacgattttccaagagtgtagactttaggtgctcataacacacacacacacac

SEQ ID NO: 17789 - DNA, 201 bp, Homo sapiens
actcatgcaatagttgtcttgaattatttgcaaggacctttgaatggaaggggcttataatctgggatgtcaaacacacaattgtggctcatgggtagaawacattgggaaatagatttagtatgaatatgagaaaaaatgttctagtcctttattactgtctaaatatggcccgggtctctccaggaaggggtgtgattc

SEQ ID NO: 17790 - DNA, 201 bp, Homo sapiens
gctcacaattctgcaggctgtgcaagaagcatggtgcggtcatctgcttctggtgaggaccttaggctacttccactcatggaaatgggggaaggggagcyggcatgtatagagatcacataacgaaaaaggaagcaacagagagaggggtgatgccagactcattttaccaaccagctctcatggcaactaatagagtgg

SEQ ID NO: 17791 - DNA, 201 bp, Homo sapiens
aatttgaatttcaaataaacaaacaactttttattataagtatatcccaggcttctggggacacactgtgtctcagcctgctttgtgttgctataaaatartacctgaggctgtgtaattcataaagaaaagaggtttctttggctcacaattctgcaggctgtgcaagaagcatggtgcggtcatctgcttctggtgagg

SEQ ID NO: 17792 - DNA, 201 bp, Homo sapiens
ggttgccaaaattttggaaattatgtagcgttgcttctttatgagaaatccctctcactttggctataataaatgaatattattaacaaggagtccatttyctttgcacaaacttaatgaaacatgattattttctagatgaattatctcaacgtttcacttcttttctttatcaagtatctttctaaaagtctattttac

SEQ ID NO: 17793 - DNA, 201 bp, Homo sapiens
caagttaaatttctagagcaaccactaggaggaaaaaaaaggtgcctacatattaaacttttcctataaagggccagagagtcaatattttagggccaagrggcaaaatcaaggacatccatgtaggtacttatgcaatgagagagaaaagaaatttatacaattattttatgacaaataattgagtacaatttttagtaa

SEQ ID NO: 17794 - DNA, 201 bp, Homo sapiens
ggtaatgtaaactttagactctgggtgataatgatatgttaatgtaggttcatcaactgtaacaaatgtaccgctctgggtgaggcatgttaatagtggargaggctggacatgtgtacgggaagagggcattgagaaatctctgtaacttctgttcaatttcatcatgaacctaaaactgctataaaaaataaagtctgg

SEQ ID NO: 17795 - DNA, 201 bp, Homo sapiens
gaaaaaagtcaatctgaaaaggctacatagtgtataattccaactacatgctattatggagaaagcaaaagtatggacacagtaaaaagatcagtgattaycagggattaggaaggagggagagatgaatagacagagcacagattttcagggcagtgaaactactctgtatgatagtataatggtagacacatgccatta

SEQ ID NO: 17796 - DNA, 201 bp, Homo sapiens
tgtccaaaaggatactaaattatgtttagctgtgcctacccaattaaagggggagaactggaatggaaacttgttaagccattagcagaaaaagttcttaratatcagttatatatgaatccttaggaaatgtgtgtgtatatacatacgcatataatttttacaaagacttataccttcaactttttaaaaaaacatata

SEQ ID NO: 17797 - DNA, 201 bp, Homo sapiens
catcctgtgtgtcatgaattttattttcctctaggttccagaaaaacattctctgaatctcttacctctagtcattttttttctcaatctcctctacttastcttttgtcagtcccctaaatgtttttatttatttttatttattattattattattttgagacagagtgtcactctgtcacccaggctggagtgcagtgg

SEQ ID NO: 17798 - DNA, 201 bp, Homo sapiens
tgacaatatgtctcctggagtggtaacccaacttttgggtacaaatccttcttgtctattcaaagttgagactacaagggacgttaatgtatctgcacaakaaaacgtatgcactataataacactattgacataagtcatggttttaaaaaagttaacactgaagcagaaacagagtttgggaatctatggcaaggttca

SEQ ID NO: 17799 - DNA, 201 bp, Homo sapiens
cctcaggcttgcctttcctaagtcatctgtcatctttcaaagttaacgttaaaataatcccctcatctctaaccaaatccagatttatctagcattttgcwgttagctggcaatcaaggagaaaagcacctaataagctccttcaaaagcaagcactattatggagaaattctggcataccgtacctaagcaggctttgct

SEQ ID NO: 17800 - DNA, 201 bp, Homo sapiens
gtatgatacatgagacatagaatgtacaacaccaagagtgaaccctaatgtaaactatgggctttagttaataataatgtaagattggttcatcagttgtwacaaatatacaacactaaagcaagatgttaataattggggaaactgtgagcagagtaaacaggaactctgtgcactttccactcaatttttctgtaaacc

SEQ ID NO: 17801 - DNA, 201 bp, Homo sapiens
tttgggaggccaaggtaggaggattgcttaagcccaagagtttgagactagcctggccaacatagtgacacttcactgctacaaaaaaaaaaaaaaaattrctgagcatggtggtgcatgcctgttgcatggtgatgcaagccaacttttcaacagcaacactggaagcaaaagaatataaaggatattgtcaatgtactg

SEQ ID NO: 17802 - DNA, 201 bp, Homo sapiens
tcagactaagtgtggattattaacagaaatcattcgtgtcctttcccaccccactctagaactgtcagaaagcttgcctgtgttcaaacttggtgctgagyagagaaaacaagaaagtacttaagaggttgtataaccacaagtagatccttatataggtttgaagtgaaaattcataccacttgagtggcacccccagaa

SEQ ID NO: 17803 - DNA, 201 bp, Homo sapiens
acaagccaaaccatctaagtgtttctaacacccacagtgcctagcacataagaaatcctcaactaacacattttggtttataaccttggtccaaaactacygaagttttgcaaaacaagcaggacaatgtttttctggcatgggatgtaaaaagggatgaataaataagagtttgagaagtatattctaagatgttagtat

SEQ ID NO: 17804 - DNA, 201 bp, Homo sapiens
ccattgtatggctatatcagattttctttattcacttatgagttgccatcatttgcattgttttcagttttgctattattaaagatgttgctgtaaatatygtgtacaagtttttgtgcagatgtatgttttctcttggatatatacctaggagtggaattgctgggtcatatgacaactaagtttaccttttgaggaagt

SEQ ID NO: 17805 - DNA, 201 bp, Homo sapiens
gggtgcttgttaacaggactggatacttttgtgcactgttctcacaggcctatgcactcttcgcatctgtgatgaatgggtcatacatctgccagactaaytcacttcattctgtcattcaatcacacctctcttgagtacccactatgtgcctggctctgtaagctgcttacgtgtcttactcatttttaacatcctctg

SEQ ID NO: 17806 - DNA, 201 bp, Homo sapiens
gatgaaattcagcatgaagagagctggaatactgccatcatacaggtttgcccaggctttgagcagattcatttagtgttggcaactaaccaagctgaacrgtggttagatttacatatggggaagtctacagattatattttttttgccagagccaaaacctactatcaaaaacttaaaaaaataaactaaaaaaacctt

SEQ ID NO: 17807 - DNA, 201 bp, Homo sapiens; identical to SEQ ID NO: 15666

SEQ ID NO: 17808 - DNA, 201 bp, Homo sapiens
aagcgattctcctgcctcagcctcctgagtagctgggattacaggtgcatgccaccatgcctggctaattttttgtatttttagtagaaacggggtttcascatgttagccaggctggtctcaaactcttgacctcaggtgatccacccgcctcagccttccaaagtgctgggattacaggcatgagccaccgcgcctggc

SEQ ID NO: 17809 - DNA, 201 bp, Homo sapiens
ttcctcttctttttttttttttttgagacggagtttcgctcttgttgcccaagctggagtgcaatggcgtgatctcagctcattgcaacctctacctccckggttcaagcgattctcctgcctcagcctcctgagtagctgggattacaggtgcatgccaccatgcctggctaattttttgtatttttagtagaaacgggg

SEQ ID NO: 17810 - DNA, 201 bp, Homo sapiens
gtgtacatttgtgctgccactattctatctattacccacttcacttaggcttcaatcccctccatgctctgaaactgcccttgttaagttcaccagtgatyttcatcttgttcaatcccatcttcctccctcaccttgcaggggtgaggggcatttgaccttgcaggggcatttgatacactccaaacactcagtgatttc

SEQ ID NO: 17811 - DNA, 201 bp, Homo sapiens
tcaaaaaaagaaattaataaaataaatattcttttctcttccctacatcaggaatgtagtgtaacataatatagagaattaagagtcttaaaactcattcyagccctagctcagtcacaaatttgctgtatgatttttagatgtcacttgacttctccaggtttcagtttccttaagtaaaatgagggttgttgtaggtga

SEQ ID NO: 17812 - DNA, 201 bp, Homo sapiens
cagaggctgtgaggggtagcatgtgcttctgctggactctcttgagctttgaccttctgctgtgaggatggcttgcctgacgtggtggctccttggctccyacagtgtggcattcttggaatacacctgaacattacctgcagccggaggtgtgctggtgaatggttaacaactacctttcccagggtaaactgccctggt

SEQ ID NO: 17813 - DNA, 201 bp, Homo sapiens
caacattatataatacaatacaacattaactctgaaagatttattaaaactaatgagtaaaaaaaaaatcccaagcatttctttgattctactactatatkcatagttttaaaaagtggtttattaagtatagataaattaagccagaaaattagatcttcagatcactaaatttggtgagttgttcttttcctcagttac

SEQ ID NO: 17814 - DNA, 201 bp, Homo sapiens
gaatgaatgccatcaagccacatactgtatcactacgagaaatcttttgcttatgatattaaaaacagtagacttatacatagtttaaaaggaatgggcasaatggtttcaaagcccacttcactggaaacctatacatagtcacttgcatgcacgcaagcacacacaacagatgacatataggacttacaggtccaggtt

SEQ ID NO: 17815 - DNA, 201 bp, Homo sapiens; identical to SEQ ID NO: 2138

SEQ ID NO: 17816 - DNA, 201 bp, Homo sapiens; identical to SEQ ID NO: 2138

SEQ ID NO: 17817 - DNA, 201 bp, Homo sapiens
tgcaggcatatttataaatgcacacaaaatgtatcccaaaacacagaaaaaagatgaaataacacacacacacacacacacacacacacacacacacacayaaacctaggcacagcacataggttttgtacacagataatatgtaggctaatatctatatttaaatacacatattacatatactggatggttcttacttaa

SEQ ID NO: 17818 - DNA, 201 bp, Homo sapiens; identical to SEQ ID NO: 15679

SEQ ID NO: 17819 - DNA, 201 bp, Homo sapiens; identical to SEQ ID NO: 15679

SEQ ID NO: 17820 - DNA, 201 bp, Homo sapiens; identical to SEQ ID NO: 15681

SEQ ID NO: 17821 - DNA, 201 bp, Homo sapiens; identical to SEQ ID NO: 15681

SEQ ID NO: 17822 - DNA, 201 bp, Homo sapiens
ggaattttcacgggctcataagattctgcttctgttagagagaaagcttaaattatgccacatggacattttattcaaacacatttgaagtaatatcagartgtatgacaacagaaaccaacttggaaactttttttctttgcttttcaaagagcttatttatttatttttattttaatttcaatttttcttttagattta

SEQ ID NO: 17823 - DNA, 201 bp, Homo sapiens
gcagcataactctacttataaatgacacctagaacaggaacacagactgaaacatattcagaatgaagtgaataggatggggaggatactccaaacctcayactgtgaagataggttcaagaaattgggaatttaaacatggaggaatgggtactcatgcaatagttgtcttgaattatttgcaaggacctttgaatggaa

SEQ ID NO: 17824 - DNA, 201 bp, Homo sapiens
tgtgaagataggttcaagaaattgggaatttaaacatggaggaatgggtactcatgcaatagttgtcttgaattatttgcaaggacctttgaatggaaggrgcttataatctgggatgtcaaacacacaattgtggctcatgggtagaatacattgggaaatagatttagtatgaatatgagaaaaaatgttctagtcctt

SEQ ID NO: 17825 - DNA, 201 bp, Homo sapiens
ctccaggaaggggtgtgattcatgctgcaagaccactgaaggggatgcccaagaggagtatcaatgcccagaaaaatgcttggcttagagggttttgagcyttaagtttctacttcaatttgctgtaaattgaaatttgtcagtttgaactcatgctgtgaagagtttcagttacttagcaaagaaaaaataagctggatc

SEQ ID NO: 17826 - DNA, 201 bp, Homo sapiens
tattttgtaggaatttaccacattttgtttttctattctgccactgatggacatttatattttcccaatatttcaatattatactcaatgctgcaagtcaytcctctgtatttgtttccttgtgcaaatgtgtatgagtgtccctctctctataagcagaaataaagttagtgcatcataatatgatatgcatgattttgt

SEQ ID NO: 17827 - DNA, 201 bp, Homo sapiens
gagcaggtgattttcacctgtttagctctttatggtaggtggcagtcactacttaagagagaaatgaatgccgatcattattttaggttcttatcattggygctttcagccaggaatgtatactaagaaatactgctgtgtaatgtggtggttgagagcatgagctctggggttaagctgagtttgaatcccgactccgca

SEQ ID NO: 17828 - DNA, 201 bp, Homo sapiens
aaccttggcccagactccttcacaaagcccccggtgttcaactattctcagtccaggagcccagcagtgctcccagtggagtttatgaagccgattcagasccagcaaatccaaagttttcttcccttaagcagactgacagccttacttacagaattcacttgtaatttatgacaaaaactgcactagaacttatcacaa

SEQ ID NO: 17829 - DNA, 201 bp, Homo sapiens
tttgcctttgcaaccttgggcaaaaaatacatcaaaacattctgtgtcttttaaaacagggaaacagtaaatggcttaccttctttggattttctgcacayctcttgacactccgcgttactctctgcacagattcgctctccaaagtgcttgctgcaggctggctttttgtctttcttgatctcaggcacatggagtctg

SEQ ID NO: 17830 - DNA, 201 bp, Homo sapiens
gcgtaatcagtttgtaatccagattttctacaatactgtaggacattttctttttgtgattttacatccaactctttcttcactgactcataaagcttccwaaagggagattcattttttttgctattgtcaagacattgtgtagtgggaacagacttcaattctccataacggctcactaatttaacgctggaaatttct

SEQ ID NO: 17831 - DNA, 201 bp, Homo sapiens
cttaagagtgtaaagggaccacaagattgaaaagactgagccctctgctctagagcaactacaaagatatcagctgctgatggaaatagagaaactgggamagcaacataaaagcacaggatatcaactctaaattgtatgggccaagtctgacttagaaaaattcagtgcggggatactattatataaacgttttagggg

SEQ ID NO: 17832 - DNA, 201 bp, Homo sapiens
caagattgaaaagactgagccctctgctctagagcaactacaaagatatcagctgctgatggaaatagagaaactgggaaagcaacataaaagcacaggayatcaactctaaattgtatgggccaagtctgacttagaaaaattcagtgcggggatactattatataaacgttttagggggcatgagtttccatgttttcc

SEQ ID NO: 17833 - DNA, 201 bp, Homo sapiens
agattgaaaagactgagccctctgctctagagcaactacaaagatatcagctgctgatggaaatagagaaactgggaaagcaacataaaagcacaggatakcaactctaaattgtatgggccaagtctgacttagaaaaattcagtgcggggatactattatataaacgttttagggggcatgagtttccatgttttcccc

SEQ ID NO: 17834 - DNA, 201 bp, Homo sapiens
cattaagtttttatcattgccaacctaaatctatataaacatataatatattttatgtatatattatttttacttaaatatgtatgtatatatttataacrttttatatacatatttgtgtataaattttcatagataatatttatatatttatatagaacttaggttgccaatgatgaaaacctagtgaataatatttag

SEQ ID NO: 17835 - DNA, 201 bp, Homo sapiens
ctgctttcctgagacttctcttgggctgtggcttggagcttgttggggtgtccactaggtctggctgtgaagctctgtaggatactttggtagttttttcrttagtcattgattccttagtgtgacttggtgtctggaagagctcgatgaagccggccaggtcttcagggacttcagactttcccttaggagttctcagct

SEQ ID NO: 17836 - DNA, 201 bp, Homo sapiens
tgggtgcatccccggcgagggcggctggcggagggcagaggtggaacacgctcccaccgagataacccgtcctgctatccttttcttaaaggaccaaacayctgggacactataacattactcattgccagaagatttaaaactgctaaaaattaaaaacaggcgggacgcggtggctcacgccggtaatccccgcacttt

SEQ ID NO: 17837 - DNA, 201 bp, Homo sapiens
tcagcacctctgttgcaacaaagcaggcacagctgcggttgcaggtagttctcgagatacagcaggccattcctgcaggactaaaagcagctgcgatgacytattggccaagagagaaaatgaccatccagccaagtccttgtagaaatgaaaatggaacgtaatgaaccagtctctcttacactggcctgtctgccccac

SEQ ID NO: 17838 - DNA, 201 bp, Homo sapiens
ccgcacagggcacattttgggggacagctaccctgtctggtgcaccatcctcacctgcacctggcaaggtgggtgaatggggaggaatccagacaggtgayctgggggatggcgggctattctctgatttggggaacacagagaggacagggggcaaagtggaaagtaaatgaagatgaacgagttatatctacaagtctg

SEQ ID NO: 17839 - DNA, 201 bp, Homo sapiens
tctggggaggtcttcatgggcttcttttcatttctgtttatttctattctttctgctaatacaaagacctcagttatttgctgttctgcctcagtcttatyttggcgtctggagcgcagggatattccctaaagaaatgagaagacatccacaaaattccaataattagtaaaacaaacttcaaaattcaacagggagcac

SEQ ID NO: 17840 - DNA, 201 bp, Homo sapiens
atctgctttggagactccttaaacgttctgatgctcttgccatctcctgctggctctctgtgcgtgtgcgtggtctcccctgacgtccgtgtgaacttgcygactgctaggagctcttctttcacacctactttccccagggatgccttcaactgttgttttgtgtgtgttggggtgtttattggttctggttgtaatgac

SEQ ID NO: 17841 - DNA, 201 bp, Homo sapiens
gaccagatcccacaggccctgggaggcgaaaaagtaaaaacagcttgtatttaatgggaatgtcctattacatggaaattcacttggaaactgaagctcasagaagttaccataccatggtggaaatgggtgggtatttgttctcaaatccagtcagcctaggggaatgggcagtatttgtcagatctctccctcccccag

SEQ ID NO: 17842 - DNA, 201 bp, Homo sapiens
gctgccaattacatcttctgcgtccagcttccgctttgcaggttgcttaaatgctttcgtgcctttgccctcacctaccggctctttgtcggtgtgcgtgstctcccctgaggtttgtgtgagcttgccaactgctaacagctcctccttcacttctactttctgggcacgtgtcctgggccgtctctttgagcttgttgc

SEQ ID NO: 17843 - DNA, 201 bp, Homo sapiens
atgaaaagctatacttaaaagacacaaaggaatacttacatcaattttggataatgactatttttaatactctgtgctttttcaaaaacgtttgtttgtartgttaaatatgtttagaggtttaatcatccccaaatgtgcttatttgatgctagcacttctgtgcatcagtttcttcatatacaataaagaaattacatt

SEQ ID NO: 17844 - DNA, 201 bp, Homo sapiens
cttccttaaccccaataaaataatttgattttaaggtaacaggacatcagagcaaaggaaagactatcccttacaactgagaatttgtttggcaggaggaygactatagatgggtgtttctgagctttggcactgttgacatcttgggccagatgcttctgtattgtgggggctgccctgagcctggtaggatgcccaccc

SEQ ID NO: 17845 - DNA, 201 bp, Homo sapiens
acatcagagcaaaggaaagactatcccttacaactgagaatttgtttggcaggaggacgactatagatgggtgtttctgagctttggcactgttgacatcwtgggccagatgcttctgtattgtgggggctgccctgagcctggtaggatgcccaccctgacctctcctccgcgatgacagcgcatgcccctgtcctatat

SEQ ID NO: 17846 - DNA, 201 bp, Homo sapiens
accaccaccaaacaggacagcaatataagaggaaacgttctcgaattccaggcaggaagactttctgtcccattttcctattgccacaaggagccaagagrcaagtgtatggcttccttccttcattctctgtgtccccagtggccagggatgcccactgtggaggcacccgggggcgcacagtgtcttcagacgcctgcc

SEQ ID NO: 17847 - DNA, 201 bp, Homo sapiens
tgtctgtgtgagcttgccaactgctaggagctcttctttcacgcccactttccccagggatgtcttgagccgtcgcttggagcttgctgggtttttgtctrggtctggttgtgaagatttgcaggctactttggcagttttatcgttagtcattgattcctcagtgtgacctcgtgtctggaagagctctttaaagccagc

SEQ ID NO: 17848 - DNA, 201 bp, Homo sapiens
gggaaataacagtagattcctcccttgaaatcctggtacataggcctcataaaaagagtgattccattaataatgtactcattttgtaaaaaagagagcamagagaagatatgttatgctcttcgctttgcttttcttggaaaggaaacaaatgaagttagctgacctctgggtcctcctaacaagaccccacacgtgagc

SEQ ID NO: 17849 - DNA, 201 bp, Homo sapiens
agagacagcgccctaactttccttcatatggaattatttccggaagggtggaagaactaaagaataacatatatatataacttttataaaagtctgatgcsccaaaggaagaaaagcttatcatctggattattaagaaaatatctaaaaaatattaacaaaggcaaagaatctaacttccttaatcaattttaggtttct

SEQ ID NO: 17850 - DNA, 201 bp, Homo sapiens
ttttaggtttcttgatacgtaacaccttgcttctaaaactatctatgtgagggatggttttttatttccaatctgaagtggaacaagaatcttatgactamacaatataaatgaaccactaataaaattatgaatatgtaaagtatataatctcacttttgttgtacgattacattcaatagccacaaaattgctgtcgaa

SEQ ID NO: 17851 - DNA, 201 bp, Homo sapiens
tgtgggatgcctcagaaactggcttccagcacgggaactgatgaccatcagattcaacattaaggctgctcctctagggaagaaggcagtacttaaatggyagaaatggactgggcatggtggctcaagcctgtaatcccagcactttgggaggcccaggtgggtggatcacgaggttaggagttcaagaccagcctggtc

SEQ ID NO: 17852 - DNA, 201 bp, Homo sapiens
ccaaggagctcatctgaaactagctttaggagcactctaaaatgtaggaaaaatatgaattctcagggctcatcctaagcctaaatcccactaaatttccragcacatgccgacaactgtgttttaataagctgtacaactaaaatacctcttccacactgatatactcaaactatctaaattgcgaagcacgtgtcgaca

SEQ ID NO: 17853 - DNA, 201 bp, Homo sapiens
tgcattaaaaaacagctaatacaaatgaagacaataacagagattcatttagcagaatggatttttaaatgacccaactaatacgttgtctacaagagacrcaattttgattcaaagacacaatcttttaaaataaaagcatgggaaaagatataccatgcaaacagcaagcagaggggaactggagtactgtactaacat

SEQ ID NO: 17854 - DNA, 201 bp, Homo sapiens
taataggtggtgatcaaaagggtgttcacatgataaattgacctgtccatcttgttttgtacctttttctctgtgtatattttgctttaaaataaaaaagratagaaaaatctcatgcagtttcaaaacacttggaagaaaataacaaactcctttaggacaaggtcaacctccctctgcataattatttgcacccaaatc

SEQ ID NO: 17855 - DNA, 201 bp, Homo sapiens
aaaaatctcatgcagtttcaaaacacttggaagaaaataacaaactcctttaggacaaggtcaacctccctctgcataattatttgcacccaaatccttgwattccatcacattttgtcccaattagtcatcttcctagatccatatccttttaaattaagattagtgttgagaatgaaaacctgaaatactttgacatcc

SEQ ID NO: 17856 - DNA, 201 bp, Homo sapiens
cagctgcgatgacttattggccaagagagaaaatgaccatccagccaagtccttgtagaaatgaaaatggaacgtaatgaaccagtctctcttacactggyctgtctgccccacccacacttagtttctttccccactctccctataataaaaataccatgggttttaagaccatttcatcacatactttattggacatct

SEQ ID NO: 17857 - DNA, 201 bp, Homo sapiens
aggactgtcctgtgcagatgtccaatagccttaatttggggaccaaatgcccccggccattggaaagacagatcttgtaagctccattcatccgtgcgctyatccattcattcgtgtttaccgagtgcctgctcagtgttgggacagacgaggatagttgttcctgccaccgtgccctggaggacataggcaaacaaacga

SEQ ID NO: 17858 - DNA, 201 bp, Homo sapiens
tgggcatcagtgcccttcttgagcctctcctcttccctctctggaacagtctatgggcatctccccactaggacttcctgcccaccatccagacacacaakccctccccctccactggctgcctggctatgcagcaggtactggggacacctgggaatctttccttttcttggcagttgaagcttcctagtttgtgccgaa

SEQ ID NO: 17859 - DNA, 201 bp, Homo sapiens
tgagagagctcttggaagctggccagatcttccaggggttgggccttttccttaggtgctcttggctgtctcctgctgccaattacatcttctgcgtccascttccgctttgcaggttgcttaaatgctttcgtgcctttgccctcacctaccggctctttgtcggtgtgcgtggtctcccctgaggtttgtgtgagcttg

SEQ ID NO: 17860 - DNA, 201 bp, Homo sapiens
ggcggtcgaggctgcagtgagctgagatcgcgccactgcactccagcctgggcgacagagcaaagccctgtctcaaaaaaaaaaaaaaaaaaaaaaaaaaaatcgaaaccttcctcttcagtgcatacatcttaccaaacacaaaaacaaccaattatataaagtagtttggtgtgtcttttcctgctatacgtgtattct

SEQ ID NO: 17861 - DNA, 201 bp, Homo sapiens
cctttcagttagctgtgttaaatgaagatatttgaaaaggaattaacgtattgcctataaatgcaaaggaccatcccaatccctacatataaaaaccaaaygattgggaataaacatcagatcactgcctagatttctgctgggctggtcctgaaataaggtgattccatgaatatcgtactcaatttttttagagttcat

SEQ ID NO: 17862 - DNA, 201 bp, Homo sapiens
ttggctcccttgatcagggaggcctcgatgcaggggacccctgaggacttcctattcctttcagagagtccataaggtcaaaaccatttatctaatgaccytctgtgttacttgcccttctcattctcatgctcccaagagtgtggggtgtggttctgcaaatgcagaagcagtgaggagactcccactgtctccgtttca

SEQ ID NO: 17863 - DNA, 201 bp, Homo sapiens
atgaaaacttttggcctcagtgaaatgacctgatttgaatttataggcaacctaagtaagatctgaagcagtcacacatctgatattatttctcatggtaragagtttggaatcaagtctctctttctaagattcactttcaaatctttgttggatgtctttaatcatctgaatttatctcaatttggataatatcttgtt

SEQ ID NO: 17864 - DNA, 201 bp, Homo sapiens
ggaaagactatcccttacaactgagaatttgtttggcaggaggacgactatagatgggtgtttctgagctttggcactgttgacatcttgggccagatgcwtctgtattgtgggggctgccctgagcctggtaggatgcccaccctgacctctcctccgcgatgacagcgcatgcccctgtcctatattgtgacatggaaa

SEQ ID NO: 17865 - DNA, 201 bp, Homo sapiens
agtgttaaaggaaaccctctggggaaaggataaccacttataacgtcaggttacatgcaaagtataacacagaaattcacaactatccaagacgatattgrgtgatgctgtaatacttcctctcaccttattttcagggaccgagtcttgtaatttgtgttcctctttgttggttttcatgtcgttgctgttcagctcttc

SEQ ID NO: 17866 - DNA, 201 bp, Homo sapiens
caggtgtttgctttggagcgcttgtaaagctatcagcagcaccatttgccagttcctcagtgtggcctggtgtttgagagagctcttggaagctggccagrtcttccaggggttgggccttttccttaggtgctcttggctgtctcctgctgccaattacatcttctgcgtccagcttccgctttgcaggttgcttaaatg

SEQ ID NO: 17867 - DNA, 201 bp, Homo sapiens
gagagagctcttggaagctggccagatcttccaggggttgggccttttccttaggtgctcttggctgtctcctgctgccaattacatcttctgcgtccagsttccgctttgcaggttgcttaaatgctttcgtgcctttgccctcacctaccggctctttgtcggtgtgcgtggtctcccctgaggtttgtgtgagcttgc

SEQ ID NO: 17868 - DNA, 201 bp, Homo sapiens
agcttcgtattcactgaacgacatgaggctacttatgtgtctataaatctgtcttataagagccatgcacaattaagaataatgttatttggtgctatagyggggtcatcattaagcaaagttagatgctgaaatgatcatagaaggtaaaaatactgcttcagaaggttcctccaaaggttgccatgccctgtgtcattg

SEQ ID NO: 17869 - DNA, 201 bp, Homo sapiens
caaaaactgcactagaacttatcacaaaactaactttattatatttttcccagttcgatttttctgtcaaatatcttcactgtccctatgacttctggttsttattttcttgacacacacattgtcctcagcctgtgtgggaagaaaaaaaatagaactcttaagtaatttaaacacccatttttagaatcgacctcctct

SEQ ID NO: 17870 - DNA, 201 bp, Homo sapiens
ggttcttattttcttgacacacacattgtcctcagcctgtgtgggaagaaaaaaaatagaactcttaagtaatttaaacacccatttttagaatcgacctmctctgcaaaaccccaaaggcttactaggtattatgcaggtccttagttgcagaaaattaattttgaggttggaaataagttttaaaatatattccattaa

SEQ ID NO: 17871 - DNA, 201 bp, Homo sapiens
gttcttattttcttgacacacacattgtcctcagcctgtgtgggaagaaaaaaaatagaactcttaagtaatttaaacacccatttttagaatcgacctcmtctgcaaaaccccaaaggcttactaggtattatgcaggtccttagttgcagaaaattaattttgaggttggaaataagttttaaaatatattccattaac

SEQ ID NO: 17872 - DNA, 201 bp, Homo sapiens
aaattaattttgaggttggaaataagttttaaaatatattccattaacattgtttttcttgacttgaactgcttttattatgcagtttttttacacttaartaatgtgatcttttcatacagaagttcctaatgcatttttaagctaattcataataaaatttcttcatcgatgcacacattttcacaaactaaaaaatgt

SEQ ID NO: 17873 - DNA, 201 bp, Homo sapiens
ataaaatttcttcatcgatgcacacattttcacaaactaaaaaatgtcactcagaaaaagtgaatccaaccaggattaagtcttttgggtctcctaaaccraggaacccctgtagacagaagcatgcccaacttgcatgcaggggacctgccttggcctttactcttgcagtagttctcaccccttggctaagggagagga

SEQ ID NO: 17874 - DNA, 201 bp, Homo sapiens
atgtcactcagaaaaagtgaatccaaccaggattaagtcttttgggtctcctaaaccaaggaacccctgtagacagaagcatgcccaacttgcatgcaggrgacctgccttggcctttactcttgcagtagttctcaccccttggctaagggagaggaaccatggtgaaaagcatggctacaagcttcttactggaaaaaa

SEQ ID NO: 17875 - DNA, 201 bp, Homo sapiens
acctgccttggcctttactcttgcagtagttctcaccccttggctaagggagaggaaccatggtgaaaagcatggctacaagcttcttactggaaaaaatstatcttatatatgcattttctaggactaccgacacccaccgaagagctcggcaaagaggagcatgtgtgtgttgggcgtctcctgggtgcttgtgtgtga

SEQ ID NO: 17876 - DNA, 201 bp, Homo sapiens
ctttgctcctatggagaaatgactgtctctgctgacaaattataaataaggaattcaggataaatttcaataacaatgcctaataagatatatatcaaatstaatttttacagtttacattatagaaagaaggtccgttattcattcatttacagggagtaaatgaattcctattcctttaaccatcactgctaaggcaga

SEQ ID NO: 17877 - DNA, 201 bp, Homo sapiens
ggcagaacaggaaattgccatttctggagtttccccaaacttctctgcatgcagtgggagcctctctatctaacagtccagacagtttccccttctcaagratacacattccttattgatattgttctgatagttaaaatagtgacatagataggatttttaacccagtcctggtcttggtgacagtatccagaacataga

SEQ ID NO: 17878 - DNA, 201 bp, Homo sapiens
ttctctgcatgcagtgggagcctctctatctaacagtccagacagtttccccttctcaagaatacacattccttattgatattgttctgatagttaaaatrgtgacatagataggatttttaacccagtcctggtcttggtgacagtatccagaacatagaactgaaccacccacctatcctctgatcaattttttaaaca

SEQ ID NO: 17879 - DNA, 201 bp, Homo sapiens
tattgcggaagaaccaaagtcaatattaaacatcacctatactgaagatctgtaaccccccacgagctcagaactactgactgcgtcatcagttttctcayaaatgggccataggacctgtcgatgaactgaggctccacttggcatgtgcgccctcttggctggtggatacttagggtggatctgagagcctagattcac

SEQ ID NO: 17880 - DNA, 201 bp, Homo sapiens
gtgggtgactctggctgccagttacattttatcctgagtcgggaacatctgttgtaaatgatatactgccaatgggaaagaaaaaataccatctactagtkcctatcccaaaacatcatagtgttaggaataaaggcaaccaattcaaactctttagagttattggcagaggtttctttcctaaattagtttcttcagact

SEQ ID NO: 17881 - DNA, 201 bp, Homo sapiens
atggagtctcgctctgttgcccaggctggagtgcaatgggcatgatctcggctcactgcaacctccacctcctgggttcaagcaattctcctgcctcaccstcccgagtcgctgggactataggcatatgccaccacgcccagctaatttttgtattttgggtagagatggggtttcatcctattggtcaggctggtctca

SEQ ID NO: 17882 - DNA, 201 bp, Homo sapiens
gtttgttgttgttgagatggagtctcgctctgttgcccaggctggagtgcaatgggcatgatctcggctcactgcaacctccacctcctgggttcaagcarttctcctgcctcaccctcccgagtcgctgggactataggcatatgccaccacgcccagctaatttttgtattttgggtagagatggggtttcatcctatt

SEQ ID NO: 17883 - DNA, 201 bp, Homo sapiens
atgaacacaactcattcacttcctgaaatattctcgttaaaatttttattagcagtttttgctgttattgttgttgtttgttgttgttgagatggagtctygctctgttgcccaggctggagtgcaatgggcatgatctcggctcactgcaacctccacctcctgggttcaagcaattctcctgcctcaccctcccgagtc

SEQ ID NO: 17884 - DNA, 201 bp, Homo sapiens
gggaaatcagaagacatctacaaaattccaataatgattgaaacaaatctcaaaattcaactaaaagtaaactcaaaaagaaatgcatttaaaaatattargctgattaattttttaagatgtcagtaatctaagatatccaatatgatgctttgccaatctatgaacaagaaaagtctgattataacagcttacattata

SEQ ID NO: 17885 - DNA, 201 bp, Homo sapiens
aagtctgacttagaaaaattcagtgcggggatactattatataaacgttttagggggcatgagtttccatgttttcccccattaaacgatcaaacaaagcycaccactgcataaccccataaaacacaacttttctcatcctaattactgcttgtttccagagacagttcttccaccctcatggatgcagcctaattagaa

SEQ ID NO: 17886 - DNA, 201 bp, Homo sapiens
gcaactacaaagatatcagctgctgatggaaatagagaaactgggaaagcaacataaaagcacaggatatcaactctaaattgtatgggccaagtctgacktagaaaaattcagtgcggggatactattatataaacgttttagggggcatgagtttccatgttttcccccattaaacgatcaaacaaagctcaccactgc

SEQ ID NO: 17887 - DNA, 201 bp, Homo sapiens
tgcagagcactgggcttcgggaaaccataatttacttaatcattactattgccacatacttaggtttacaatgttttgttattagaaaacattcttcaatkgaaatggcttgtgcatgccaagatgggtgaatcctaaaataattctacacaggattctatcggggtctgcttcagttgcgctggtggccatgtgggctca

SEQ ID NO: 17888 - DNA, 201 bp, Homo sapiens
attagggcccatactaatagctcaaaaagccttcattgcctttttaaatgccctctttccaaatacagttacatcctaaggtacgaggggttaggaattcmaaatatgaatttcgggagagcacaaatcagtccataataggtggtgatcaaaagggtgttcacatgataaattgacctgtccatcttgttttgtaccttt

SEQ ID NO: 17889 - DNA, 201 bp, Homo sapiens
gaaaagcacaagccaggcacaaatgtatacattcttgtatcactgttaaggacttttataagaacagacaaaactatcgtgttcagagatccatgcttagrtagtgaaactcgagacgtttatgatatcctaaaagccaaaacggtggtttacttgctgagggaatgaagtagtgattagacaacagcatttttaaaaagc

SEQ ID NO: 17890 - DNA, 201 bp, Homo sapiens
atataatatatattattatattatatattactatataacatatagtatatactatataatattatatattataatatattataattatatatgattatatrtaatatattataattatatattatataagtgatatatataatatataattatatattacatatatatgagacactgtagaatacagttttcaattacaca

SEQ ID NO: 17891 - DNA, 201 bp, Homo sapiens
agataactctcctaagccaagatattccaaggagctcatctgaaactagctttaggagcactctaaaatgtaggaaaaatatgaattctcagggctcatcytaagcctaaatcccactaaatttccaagcacatgccgacaactgtgttttaataagctgtacaactaaaatacctcttccacactgatatactcaaacta

SEQ ID NO: 17892 - DNA, 201 bp, Homo sapiens
ctccccttttgagaggcgtattaggaggcaagttttcatcaaatagttcaggtcttaggtgcccaccaaaggacacacgccttcttttcaaaggtattccstcactctcatctaaagtaacggatacaaatgtggaaagagcaatgaaaaaacataccaagactagtgatttatttcacgttagcattaaagacaaaccaa

SEQ ID NO: 17893 - DNA, 201 bp, Homo sapiens
gcagattaacaagttaactctcttcactgtaaagcaccttccagctttctatgtatacgctgctctccagggtaaagacatgcatttgacatttccacacytatttcatgcaggacatgtgatcccaaaaattagcagagacttgtctttgcaagccaaaacagctttatcttccctgaacactaagaccccagaagggtg

SEQ ID NO: 17894 - DNA, 201 bp, Homo sapiens
aaacattagaaacaaacagctgtttcttgccttaaatcgccaataaaataacatggattatccttatgtggttagggtccatattacacaggaaatatttrcctaccgcaaacatcttcagggtagcaagctgttccctctgtgacaggaatacagtgaccagtgccaaatgagagattagacagattctcatctcccatc

SEQ ID NO: 17895 - DNA, 201 bp, Homo sapiens
tagaaggtaaaaatactgcttcagaaggttcctccaaaggttgccatgccctgtgtcattgacgtaaatataggcattttttccttcaaacattagaaacraacagctgtttcttgccttaaatcgccaataaaataacatggattatccttatgtggttagggtccatattacacaggaaatatttacctaccgcaaaca

SEQ ID NO: 17896 - DNA, 201 bp, Homo sapiens
agatggctgttttgctgcattctgtgcactgaagaacacatttcctcctgaaataaaaacatacacaataaaaacattctattagtgtctcatgtcaatcragtattacagcctcataaaatatggtaaaaaactaaatatttagcttcgtattcactgaacgacatgaggctacttatgtgtctataaatctgtcttata

SEQ ID NO: 17897 - DNA, 201 bp, Homo sapiens
agcttctgtatattcctgaactctgtagaccttcctgacctgtttgcagtggatactgtttttgaaggctctgtctcagtatctgaagtttttgtctccasagaagtcattttgtaggtgttcctgggcgtttttgctacgtttccattttctctaatacactgccgtcttaagggagggcttgcagagcatttatcagat

SEQ ID NO: 17898 - DNA, 201 bp, Homo sapiens; identical to SEQ ID NO: 17840

SEQ ID NO: 17899 - DNA, 201 bp, Homo sapiens
tccctctacatctgctttcctgatacttctcttgggtcgttgctttgtgcttgttggggtgtccactgggtctgactgtggagagtcgcagggtattttartggttttaccagcagccactaattcctcggtgtgaccaggagtctggaagagctctttaaagccagccaggtcttctagagcctgggccttttccttagg

SEQ ID NO: 17900 - DNA, 201 bp, Homo sapiens; identical to SEQ ID NO: 2292

SEQ ID NO: 17901 - DNA, 201 bp, Homo sapiens
ctctacgtctgctttcctgaggcttctcttgggccgttgctttgtgcttgctggggtgtccactgggtctggttgtggagatttgcaggctattttggtakttttctcatcagtcgtgggcttgtcagtgcctggtgtctggaagagctctttgaagccagccaggtcttctagagcctgggccttttccttaggagtttg

SEQ ID NO: 17902 - DNA, 201 bp, Homo sapiens
ctcatcaccgcttgctggttctttgtgtgtgtgtgtgctttgccctgatgtttgcgtgagcctctcaactgctgagagctcctcttttacttctttcctgrgacgtgtcttggggcatctctttgtgctcgtggcagtgtctgttagttctggtgggggagatttgcagggaatttttgtgtttttgtcaatagtcattga

SEQ ID NO: 17903 - DNA, 201 bp, Homo sapiens
gaagccggccaggtcttccaggggttgggccttttccttaggtgctcttggccttctcctgctgggttcctcttctactgggtttggtttcttctttgcaygttgcttcaatactttgatgccctcatcaccgcttgctggttctttgtgtgtgtgtgtgctttgccctgatgtttgcgtgagcctctcaactgctgagag

SEQ ID NO: 17904 - DNA, 201 bp, Homo sapiens
tctgcatccgtggtttcccctgatgtttgtgtgaacttgactgctgaaggctcttcttttacttgtaccttctgcacacgtgtcctgagatgcctctttgkgcttgctgtggtgtctaccacttctagtgggggagattcgcagggtattttagtggctttgccagcagtcagtgattcctgagtgtgacctgatgtttca

SEQ ID NO: 17905 - DNA, 201 bp, Homo sapiens
actttccctgggtgctcttggccgtctcctgctgccagttacacttgctgctggagccggtgtctgttttgcagattccttcaatgctttgatgcctttaycttcacctgctggttctttgtctgcatccgtggtttcccctgatgtttgtgtgaacttgactgctgaaggctcttcttttacttgtaccttctgcacacg

SEQ ID NO: 17906 - DNA, 201 bp, Homo sapiens
ctcacctaccggctctttgtcggtgtgcgtggtctcccctgaggtttgtgtgagcttgccaactgctaacagctcctccttcacttctactttctgggcaygtgtcctgggccgtctctttgagcttgttgcggtgtcttctagttctggtgatgatttgcagggtattttagtggttttgtcatcagtcattgattcttc

SEQ ID NO: 17907 - DNA, 201 bp, Homo sapiens
accatttgccagttcctcagtgtggcctggtgtttgagagagctcttggaagctggccagatcttccaggggttgggccttttccttaggtgctcttggcygtctcctgctgccaattacatcttctgcgtccagcttccgctttgcaggttgcttaaatgctttcgtgcctttgccctcacctaccggctctttgtcggt

SEQ ID NO: 17908 - DNA, 201 bp, Homo sapiens
aacgtcaggttacatgcaaagtataacacagaaattcacaactatccaagacgatattgagtgatgctgtaatacttcctctcaccttattttcagggacygagtcttgtaatttgtgttcctctttgttggttttcatgtcgttgctgttcagctcttccgcaggttcaattctttttgcagaagtcctcaaacttctct

SEQ ID NO: 17909 - DNA, 201 bp, Homo sapiens
ctcaccccttggctaagggagaggaaccatggtgaaaagcatggctacaagcttcttactggaaaaaatctatcttatatatgcattttctaggactaccracacccaccgaagagctcggcaaagaggagcatgtgtgtgttgggcgtctcctgggtgcttgtgtgtgagaagaggctggaacgcccccggcagaacaca

SEQ ID NO: 17910 - DNA, 201 bp, Homo sapiens
ttttcttgacttgaactgcttttattatgcagtttttttacacttaaataatgtgatcttttcatacagaagttcctaatgcatttttaagctaattcatrataaaatttcttcatcgatgcacacattttcacaaactaaaaaatgtcactcagaaaaagtgaatccaaccaggattaagtcttttgggtctcctaaacc

SEQ ID NO: 17911 - DNA, 201 bp, Homo sapiens
cactgtccctatgacttctggttcttattttcttgacacacacattgtcctcagcctgtgtgggaagaaaaaaaatagaactcttaagtaatttaaacacycatttttagaatcgacctcctctgcaaaaccccaaaggcttactaggtattatgcaggtccttagttgcagaaaattaattttgaggttggaaataagtt

SEQ ID NO: 17912 - DNA, 201 bp, Homo sapiens
tatagtacaagtcagtaccgctgatttctgcattcattcagcaagtatttatgatgtcacctggctccccgccagacactggggaaacaaacgtggagacrgggcactgcccgcacagggcacattttgggggacagctaccctgtctggtgcaccatcctcacctgcacctggcaaggtgggtgaatggggaggaatcca

SEQ ID NO: 17913 - DNA, 201 bp, Homo sapiens
gggagtgtgtggtggttggaggtgcctgcctaagggaggcaggagatggtaggtacagagttagtgtaagaaagcccaagagaggctgggggaccagatcscacaggccctgggaggcgaaaaagtaaaaacagcttgtatttaatgggaatgtcctattacatggaaattcacttggaaactgaagctcagagaagttac

SEQ ID NO: 17914 - DNA, 201 bp, Homo sapiens
ctccctataataaaaataccatgggttttaagaccatttcatcacatactttattggacatctcctgtggctggtcactgggatacagtaaccaggaaatrcagtcggccctcatgaatgaacaaaacttacaaccccaggaggggagccagaaactcaattagtggcttagtttccacaacactacgtgctacaaagagg

SEQ ID NO: 17915 - DNA, 201 bp, Homo sapiens
gtttctttccccactctccctataataaaaataccatgggttttaagaccatttcatcacatactttattggacatctcctgtggctggtcactgggatasagtaaccaggaaatacagtcggccctcatgaatgaacaaaacttacaaccccaggaggggagccagaaactcaattagtggcttagtttccacaacacta

SEQ ID NO: 17916 - DNA, 201 bp, Homo sapiens
ctcagccacacgaaatcatttagttaagtagctacagtttactttatggagtcgccgtttgccatgttaattcttgatgacagcccaggatgtgggctgcrgactgaacccacttccttcaccagactgaccaccgagcacggctctccctccctcctcagcctctcaagatggtagatgcacccacctgcaaacttttct

SEQ ID NO: 17917 - DNA, 201 bp, Homo sapiens
ttcatctagaggacttttccaggaaacccagcaaacagtaggatctcagccacacgaaatcatttagttaagtagctacagtttactttatggagtcgccrtttgccatgttaattcttgatgacagcccaggatgtgggctgcagactgaacccacttccttcaccagactgaccaccgagcacggctctccctccctcc

SEQ ID NO: 17918 - DNA, 201 bp, Homo sapiens
catcatggatattatttgttccctcatgaagagcaatagcaatgaaatccacatttccaaattatggagtgctgtgtgcctacgtggcactcaatgccagkaataccaggatgggggtttggtgactgtgtcctggagatgccttgggggtctgggagcacctggacagcacagaaatcagtttctccagctgtaaccaga

SEQ ID NO: 17919 - DNA, 201 bp, Homo sapiens
tgccaatacatcatggatattatttgttccctcatgaagagcaatagcaatgaaatccacatttccaaattatggagtgctgtgtgcctacgtggcactcratgccagtaataccaggatgggggtttggtgactgtgtcctggagatgccttgggggtctgggagcacctggacagcacagaaatcagtttctccagctg

SEQ ID NO: 17920 - DNA, 201 bp, Homo sapiens
acacaacaaaccaatcaaacctccttcctgaaatcactgtgcgcgctgtgggggtggcagcgggggagggggggcgtggcttcctgccaatacatcatggrtattatttgttccctcatgaagagcaatagcaatgaaatccacatttccaaattatggagtgctgtgtgcctacgtggcactcaatgccagtaataccag

SEQ ID NO: 17921 - DNA, 201 bp, Homo sapiens
acaaatgataaaggagcacctgccctaaccccaagcagacagacaacaagggccaggatggattttagaacactctgacctgtgagagaggcggacaggcmtgcaccagctgtatttctgtagtgacatacacaggtgtatcacgcagggagcctgtccagtcacggagccctgggactgtaccatcaacacagtttttgt

SEQ ID NO: 17922 - DNA, 201 bp, Homo sapiens
taaactttacaaatgataaaggagcacctgccctaaccccaagcagacagacaacaagggccaggatggattttagaacactctgacctgtgagagaggcrgacaggcctgcaccagctgtatttctgtagtgacatacacaggtgtatcacgcagggagcctgtccagtcacggagccctgggactgtaccatcaacaca

SEQ ID NO: 17923 - DNA, 201 bp, Homo sapiens
accctacgaggcaagaaattgccatcttcactctcccagctagggaaactgaggctcagaaaggccaagcaatgggcccaagtcatgcagcgagcaagggrcagggctgggattggaagccaggcctctcagcttccaacgtcctggggctgggagccggtgggggttccagggcccgggaagaccccaaagcccaaagtg

SEQ ID NO: 17924 - DNA, 201 bp, Homo sapiens
gacagggagggggtggtgtgttttatgaatggacttggtgccttccataattccctcatcctcagaatcatgaaccgagacacatactttgggttctcctytctgggatgagagacgtgcagatctgtgtggtccaagtttgaatactagggccatcctgcctctttagaattctgggacgacctctcttgccagatgctg

SEQ ID NO: 17925 - DNA, 201 bp, Homo sapiens
ttttaccagcagccactaattcctcggtgtgaccaggagtctggaagagctctttaaagccagccaggtcttctagagcctgggccttttccttaggagtytgtagctgtcttttgctgccaggtaaagttcctgccaggtccagtttctgcactggagttcccataaatgctttaatgtctttctcatcacctcctgctg

SEQ ID NO: 17926 - DNA, 201 bp, Homo sapiens; identical to SEQ ID NO: 17901

SEQ ID NO: 17927 - DNA, 201 bp, Homo sapiens
ttccctaaacgcgttgatgcttttatcctcacctcctggtactttatctgtgtgtgtggtttcccctgatgtctgtgtgagcttcttcagggctgagagcwccttctgtacgtcccttttctccaaaggtgtcttgggctgccttcttgtgcttgttggggtgtctgctgattctggtggagaagattcgcagggcatttt

SEQ ID NO: 17928 - DNA, 201 bp, Homo sapiens; identical to SEQ ID NO: 17907

SEQ ID NO: 17929 - DNA, 201 bp, Homo sapiens; identical to SEQ ID NO: 17906

SEQ ID NO: 17930 - DNA, 201 bp, Homo sapiens
tttgtcatcagtcattgattcttcagtgtgacctgctgctgggtctttgaagccagctaggtcttctatggcttgggcactttccctgggtgctcttggcygtctcctgctgccagttacacttgctgctggagccggtgtctgttttgcagattccttcaatgctttgatgcctttatcttcacctgctggttctttgtc

SEQ ID NO: 17931 - DNA, 201 bp, Homo sapiens
tttgcagggtattttagtggttttgtcatcagtcattgattcttcagtgtgacctgctgctgggtctttgaagccagctaggtcttctatggcttgggcaytttccctgggtgctcttggccgtctcctgctgccagttacacttgctgctggagccggtgtctgttttgcagattccttcaatgctttgatgcctttatc

SEQ ID NO: 17932 - DNA, 201 bp, Homo sapiens
atgatttgcagggtattttagtggttttgtcatcagtcattgattcttcagtgtgacctgctgctgggtctttgaagccagctaggtcttctatggcttgrgcactttccctgggtgctcttggccgtctcctgctgccagttacacttgctgctggagccggtgtctgttttgcagattccttcaatgctttgatgcctt

SEQ ID NO: 17933 - DNA, 201 bp, Homo sapiens; identical to SEQ ID NO: 17899

SEQ ID NO: 17934 - DNA, 201 bp, Homo sapiens
ttaaagccagccaggtcttctagagcctgggccttttccttaggagtttgtagccgtctcttgctgccagttaagttctctgtcaggtccagtttctgcaytggagttcccataaatgcgtagatgtttttctcaccacttactgctggtttgggtgtgtgcatggctttgcctgctgatggtgttcgtttcctgagtgcg

SEQ ID NO: 17935 - DNA, 201 bp, Homo sapiens
attctgaatgtccatctctggggaggtcttcatgggcttcttttcatttctgtttatttctattctttctgctaatacaaagacctcagttatttgctgtyctgcctcagtcttattttggcgtctggagcgcagggatattccctaaagaaatgagaagacatccacaaaattccaataattagtaaaacaaacttcaaa

SEQ ID NO: 17936 - DNA, 201 bp, Homo sapiens; identical to SEQ ID NO: 17903

SEQ ID NO: 17937 - DNA, 201 bp, Homo sapiens
ctgctttcctgagacttctcttggactgtggcttgaagattgttggggtacccactgggtctggttgtggagatctgcaggctattttggtagttttctcrtgagtcgtgggcttgtcagtgcatattggtgtctggaagagctctttcaagccagccaagtcttctaggggttgggcttttcccttaggagttcttggct

SEQ ID NO: 17938 - DNA, 201 bp, Homo sapiens
caccaaaggacacacgccttcttttcaaaggtattccgtcactctcatctaaagtaacggatacaaatgtggaaagagcaatgaaaaaacataccaagacwagtgatttatttcacgttagcattaaagacaaaccaagtgaaaagtcatcgaaacacagtacctacagcacgcctctattcttgcaatcctggtgaagct

SEQ ID NO: 17939 - DNA, 201 bp, Homo sapiens
tgctttaggcgtgtgcatggctttgcctgctgatggtgttagtttcctgaatgctaaaaattcttcctctacgtctgctttcttgaggcttctcttgggcygttgctttgtgtttgttggggtgtccgctgggtctgattgcggagatttgcagagtatttttttggtagttttctcatcagtcgtggggttatcagtgca

SEQ ID NO: 17940 - DNA, 201 bp, Homo sapiens
tgctgctttaggcgtgtgcatggctttgcctgctgatggtgttagtttcctgaatgctaaaaattcttcctctacgtctgctttcttgaggcttctcttgrgccgttgctttgtgtttgttggggtgtccgctgggtctgattgcggagatttgcagagtatttttttggtagttttctcatcagtcgtggggttatcagt

SEQ ID NO: 17941 - DNA, 201 bp, Homo sapiens
ataaatgatttcatatcatcgaaacgaatcagcccaaacttggatattttctatcacctgttcacgtatttttcttggaaattcagttgacttccttccaytctgaagactttcattttcatacctgcagtttatagaacgacaaagatcctgattaaaaatttataccctggggcggaagtctccatatccacttaatgt

SEQ ID NO: 17942 - DNA, 201 bp, Homo sapiens
tgaggcttctcttgggccgttgctttgtgtttgttggggtgtccgctgggtctgattgcggagatttgcagagtatttttttggtagttttctcatcagtygtggggttatcagtgcatggtgtctggaaaagctctctgaagccagtcagttcttctagagcctgggccttttccttacgagtttgtagccgtctattgc

SEQ ID NO: 17943 - DNA, 201 bp, Homo sapiens
tgagagcaaccctagttagaaaagtattcccaagagaccaaggcaagccacgagtcactccttacagaaagtcactcttggtccctaaagatgtgctcacragtcattctccaaagcacaaaactttattttcagaaaggaaaggacatcaaaaataggactgtcctgtgcagatgtccaatagccttaatttggggacca

SEQ ID NO: 17944 - DNA, 201 bp, Homo sapiens
ctcatccattcattcgtgtttaccgagtgcctgctcagtgttgggacagacgaggatagttgttcctgccaccgtgccctggaggacataggcaaacaaaygacgacacagtgtggcaagtgtcacagttaaggctgctgtagggtggctgtgggtggtgacagacctcaaggcttcattctgcaaagctgagggcaaacc

SEQ ID NO: 17945 - DNA, 201 bp, Homo sapiens
gttgaagataatgctttttgtttgcctttgcaaccttgggcaaaaaatacatcaaaacattctgtgtcttttaaaacagggaaacagtaaatggcttaccytctttggattttctgcacatctcttgacactccgcgttactctctgcacagattcgctctccaaagtgcttgctgcaggctggctttttgtctttcttga

SEQ ID NO: 17946 - DNA, 201 bp, Homo sapiens
ggattttctgcacatctcttgacactccgcgttactctctgcacagattcgctctccaaagtgcttgctgcaggctggctttttgtctttcttgatctcargcacatggagtctgaatttcctgcttctcctttccctttctgattctgcatgagaaccttcgcactcttctgccctccgctctcctctgccaccttaggc

SEQ ID NO: 17947 - DNA, 201 bp, Homo sapiens
atttgcaggctattttggtagttttgtcatcagttgttgattcctcagtgtggtctggtgtctggaagagctctttgaagccggccaggtcttctagtgaytgggcctcttccttaggtgttcttggccacctctccatcccagttccatagtttgctgggtccagcatctgctttgcagattccttaaacgctttgatgc

SEQ ID NO: 17948 - DNA, 201 bp, Homo sapiens
gagctcttccactatatcccttttccccaaaggtgttttgggccgcctccttgtgcttgttggagtgtccattgattctggtggtggagatttgcaggctrttttggtagttttgtcatcagttgttgattcctcagtgtggtctggtgtctggaagagctctttgaagccggccaggtcttctagtgattgggcctcttc

SEQ ID NO: 17949 - DNA, 201 bp, Homo sapiens
atatcttgagtcgttgcttggagcttgttggggttttgactgggtctggttgtggagatttgcaggatacttctgtgattttgtcatcggtcattgattcstcagtgtgacctggtgtctggaagagctctttgaagccagccagatcttctagagccttggccttttctttaggagtttgtggccgtctcttgctgccag

SEQ ID NO: 17950 - DNA, 201 bp, Homo sapiens
tgtcatcagttgttgattcctcagtgtggtctggtgtctggaagagctctttgaagccggccaggtcttctagtgattgggcctcttccttaggtgttctyggccacctctccatcccagttccatagtttgctgggtccagcatctgctttgcagattccttaaacgctttgatgctctttccatctcctgctgtctctc

SEQ ID NO: 17951 - DNA, 201 bp, Homo sapiens
ttggggttttgactgggtctggttgtggagatttgcaggatacttctgtgattttgtcatcggtcattgattcctcagtgtgacctggtgtctggaagagytctttgaagccagccagatcttctagagccttggccttttctttaggagtttgtggccgtctcttgctgccaggtaaatttcctagcaggtccagtttct

SEQ ID NO: 17952 - DNA, 201 bp, Homo sapiens
ggagatttgcaggatacttctgtgattttgtcatcggtcattgattcctcagtgtgacctggtgtctggaagagctctttgaagccagccagatcttctakagccttggccttttctttaggagtttgtggccgtctcttgctgccaggtaaatttcctagcaggtccagtttctccactggagtccccacaaatgtgttg

SEQ ID NO: 17953 - DNA, 201 bp, Homo sapiens
cttctagagcacgggccttttccttacgagttctcagctgcctcctgctaccagttacacttgctgctgggtccaggatctgctttggagactccttaaaygctttgatgctcttactatctcctgttggctctgtgtgtgtttgcgtagtctcccctgatgtccgtgtgagcttgctgactgctaggggctcttctttca

SEQ ID NO: 17954 - DNA, 201 bp, Homo sapiens
atcacttactgctggttttggtgtgtccatggctttgcctgctgatggtgttcgtttcctgagtgctaaaaattcttcctctacgtctgctttcctgaggyttctcttgggccgttgctttgtgcttgctggggtgtccactgggtctggttgtggagatttgcaggctattttggtagttttctcatcagtcgtgggctt

SEQ ID NO: 17955 - DNA, 201 bp, Homo sapiens
tctcttgctgccaggtaaatttcctagcaggtccagtttctgcactggagtttccacaaatgtgttgatatttttctcatcacttactgctggttttggtstgtccatggctttgcctgctgatggtgttcgtttcctgagtgctaaaaattcttcctctacgtctgctttcctgaggcttctcttgggccgttgctttgt

SEQ ID NO: 17956 - DNA, 201 bp, Homo sapiens
aaaagctctctgaagccagtcagttcttctagagcctgggccttttccttacgagtttgtagccgtctattgctgccaggtaaatttcctggctggtccastttctgcactggagttcccaaaaacgtgttgatgtctttctcttcacctactgctggtttgggtgtgtgcatggctttgcctgctgatggcgtttgtttc

SEQ ID NO: 17957 - DNA, 201 bp, Homo sapiens
ggcgtaagcatggctttccctgctgatggtgttagtttcctgagtgctaagaattcttcctctacatctgctttcctgagacttctcttaggccattgctytgtgcttgttggagtgtccactgattctggtggtggagatttgcaggctattttggtagttttctcatcagtcattgattcctcagagggacctggtgtc

SEQ ID NO: 17958 - DNA, 201 bp, Homo sapiens
aggcgttcttggccacttcttcattccagttacacgggctgctgggtccaggatctgctttggagactccttaaacgttctgatgctcttgccatctcctrctggctctctgtgcgtgtgcgtggtctcccctgacgtccgtgtgaacttgccgactgctaggagctcttctttcacacctactttccccagggatgcctt

SEQ ID NO: 17959 - DNA, 201 bp, Homo sapiens
ctggttgtaatgactggcagggcattttagtgattttgcctttctcactctttggtgccttggcatgatcttgggtttggaggagattctggccacgtgcygtgtctttcatgagttctgtatcaggcaagctcttgaggtctgtcaggtcagacattggtgcacatttctgcccccaagttcttgatctcttcattgctt

SEQ ID NO: 17960 - DNA, 201 bp, Homo sapiens
taggatgcactcaacaatttctgtatttgtttcttcactcttactttccacaggtagcttctgtatattcctgaactctgtagaccttcctgacctgtttrcagtggatactgtttttgaaggctctgtctcagtatctgaagtttttgtctccagagaagtcattttgtaggtgttcctgggcgtttttgctacgtttcc

SEQ ID NO: 17961 - DNA, 201 bp, Homo sapiens
ggctctgtctcagtatctgaagtttttgtctccagagaagtcattttgtaggtgttcctgggcgtttttgctacgtttccattttctctaatacactgccrtcttaagggagggcttgcagagcatttatcagatggctgttttgctgcattctgtgcactgaagaacacatttcctcctgaaataaaaacatacacaata

SEQ ID NO: 17962 - DNA, 201 bp, Homo sapiens
agagcatttatcagatggctgttttgctgcattctgtgcactgaagaacacatttcctcctgaaataaaaacatacacaataaaaacattctattagtgtytcatgtcaatcgagtattacagcctcataaaatatggtaaaaaactaaatatttagcttcgtattcactgaacgacatgaggctacttatgtgtctataa

SEQ ID NO: 17963 - DNA, 201 bp, Homo sapiens
tggtgatgatttgcagggtattttagtggttttgtcatcagtcattgattcttcagtgtgacctgctgctgggtctttgaagccagctaggtcttctatgrcttgggcactttccctgggtgctcttggccgtctcctgctgccagttacacttgctgctggagccggtgtctgttttgcagattccttcaatgctttgat

SEQ ID NO: 17964 - DNA, 201 bp, Homo sapiens
tctcccctgaggtttgtgtgagcttgccaactgctaacagctcctccttcacttctactttctgggcacgtgtcctgggccgtctctttgagcttgttgcrgtgtcttctagttctggtgatgatttgcagggtattttagtggttttgtcatcagtcattgattcttcagtgtgacctgctgctgggtctttgaagccag

SEQ ID NO: 17965 - DNA, 201 bp, Homo sapiens
gtggctttgccagcagtcagtgattcctgagtgtgacctgatgtttcagagagctctgtgaagccggccaggtcttccaggggttgggccttttccttagrtgctcttggccttctcctgctgggttcctcttctactgggtttggtttcttctttgcacgttgcttcaatactttgatgccctcatcaccgcttgctggt

SEQ ID NO: 17966 - DNA, 201 bp, Homo sapiens
cgcagggtattttagtggctttgccagcagtcagtgattcctgagtgtgacctgatgtttcagagagctctgtgaagccggccaggtcttccaggggttgrgccttttccttaggtgctcttggccttctcctgctgggttcctcttctactgggtttggtttcttctttgcacgttgcttcaatactttgatgccctcat

SEQ ID NO: 17967 - DNA, 201 bp, Homo sapiens
gatatttttagaggttttccactgtcaggtgtttgctttggagcgcttgtaaagctatcagcagcaccatttgccagttcctcagtgtggcctggtgtttkagagagctcttggaagctggccagatcttccaggggttgggccttttccttaggtgctcttggctgtctcctgctgccaattacatcttctgcgtccagc

SEQ ID NO: 17968 - DNA, 201 bp, Homo sapiens
tagtttcctgaatgctaaaaattcttcctctacgtctgctttcttgaggcttctcttgggccgttgctttgtgtttgttggggtgtccgctgggtctgatwgcggagatttgcagagtatttttttggtagttttctcatcagtcgtggggttatcagtgcatggtgtctggaaaagctctctgaagccagtcagttcttc

SEQ ID NO: 17969 - DNA, 201 bp, Homo sapiens
atcaccgcttgctggttctttgtgtgtgtgtgtgctttgccctgatgtttgcgtgagcctctcaactgctgagagctcctcttttacttctttcctgggaygtgtcttggggcatctctttgtgctcgtggcagtgtctgttagttctggtgggggagatttgcagggaatttttgtgtttttgtcaatagtcattgactc

SEQ ID NO: 17970 - DNA, 201 bp, Homo sapiens
ctagagcctgggccttttccttaggagtttgtagccgtctcttgctgccagttaagttctctgtcaggtccagtttctgcactggagttcccataaatgcrtagatgtttttctcaccacttactgctggtttgggtgtgtgcatggctttgcctgctgatggtgttcgtttcctgagtgcgaagaattcttcttctacgt

SEQ ID NO: 17971 - DNA, 201 bp, Homo sapiens
cagtttctgcactggagttcccataaatgcgtagatgtttttctcaccacttactgctggtttgggtgtgtgcatggctttgcctgctgatggtgttcgtwtcctgagtgcgaagaattcttcttctacgtccactttcctgagacttctcttggactgtggcttggagcttgttggtgtgtccactgggtctggttgtga

SEQ ID NO: 17972 - DNA, 201 bp, Homo sapiens
tctgcactggagttcccataaatgcgtagatgtttttctcaccacttactgctggtttgggtgtgtgcatggctttgcctgctgatggtgttcgtttcctragtgcgaagaattcttcttctacgtccactttcctgagacttctcttggactgtggcttggagcttgttggtgtgtccactgggtctggttgtgatctgc

SEQ ID NO: 17973 - DNA, 201 bp, Homo sapiens
tgcgaagaattcttcttctacgtccactttcctgagacttctcttggactgtggcttggagcttgttggtgtgtccactgggtctggttgtgatctgcagkctattttggtagttttctcgtgagtcgtgggcttgtcagtgcatactggtgtctggaagagctctttcaagccagccaggtcttctaggggttgggcctt

SEQ ID NO: 17974 - DNA, 201 bp, Homo sapiens
tgcacgctaagagttctccctctacatctgctttcctgatacttctcttgggtcgttgctttgtgcttgttggggtgtccactgggtctgactgtggagadtcgcagggtattttagtggttttaccagcagccactaattcctcggtgtgaccaggagtctggaagagctctttaaagccagccaggtcttctagagcct

SEQ ID NO: 17975 - DNA, 201 bp, Homo sapiens
tttgtggccgtctcttgctgccggttaagttctctgtcaggtccagtttctgcactggagttcccacaaatatgatgatgtctttctcttcacctactgayggtttaggcgtgtgcatggctttgcctgctgatggcattagattcctgcacgctaagagttctccctctacatctgctttcctgatacttctcttgggtc

SEQ ID NO: 17976 - DNA, 201 bp, Homo sapiens
cactgggtctgactgtggagagtcgcagggtattttagtggttttaccagcagccactaattcctcggtgtgaccaggagtctggaagagctctttaaagmcagccaggtcttctagagcctgggccttttccttaggagtctgtagctgtcttttgctgccaggtaaagttcctgccaggtccagtttctgcactggagt

SEQ ID NO: 17977 - DNA, 201 bp, Homo sapiens
ggcttgaagattgttggggtacccactgggtctggttgtggagatctgcaggctattttggtagttttctcatgagtcgtgggcttgtcagtgcatattgstgtctggaagagctctttcaagccagccaagtcttctaggggttgggcttttcccttaggagttcttggctgcctcttgctaccagttacacttgctgct

SEQ ID NO: 17978 - DNA, 201 bp, Homo sapiens
agtttgcgtggcctgtactaaattgactgtgaacttcgcccacaggcttctgtagaaaacaggaaggaggtaaacaggacattaaagcataaatccacacwgaatgcaagcttcgatgacaccggtatgtgtaaagcagccattcagtgaggcccctacctttggagtagcaggtcttctttgccttttgttcattgacct

SEQ ID NO: 17979 - DNA, 201 bp, Homo sapiens
aggaggcaagttttcatcaaatagttcaggtcttaggtgcccaccaaaggacacacgccttcttttcaaaggtattccgtcactctcatctaaagtaacgratacaaatgtggaaagagcaatgaaaaaacataccaagactagtgatttatttcacgttagcattaaagacaaaccaagtgaaaagtcatcgaaacacag

SEQ ID NO: 17980 - DNA, 201 bp, Homo sapiens
tcaaatagttcaggtcttaggtgcccaccaaaggacacacgccttcttttcaaaggtattccgtcactctcatctaaagtaacggatacaaatgtggaaasagcaatgaaaaaacataccaagactagtgatttatttcacgttagcattaaagacaaaccaagtgaaaagtcatcgaaacacagtacctacagcacgcct

SEQ ID NO: 17981 - DNA, 201 bp, Homo sapiens
catccaactctttcttcactgactcataaagcttccaaaagggagattcattttttttgctattgtcaagacattgtgtagtgggaacagacttcaattcwccataacggctcactaatttaacgctggaaatttctttaaaatccccagaaatgggatcagctgcatttctgccattacgtccagcatgttctgaggaat

SEQ ID NO: 17982 - DNA, 201 bp, Homo sapiens
accctggggcggaagtctccatatccacttaatgtccaaggatcaacgaacaaactttgggtttagttcaagacatcaccttatacaaagaaataaatttwgagttagaaaagtgcttttacactaaaaactaggattagttgcatcgagtttgttttgaaataccactgtcagaggctggggacccagattaacttctga

SEQ ID NO: 17983 - DNA, 201 bp, Homo sapiens
tttcattttcatacctgcagtttatagaacgacaaagatcctgattaaaaatttataccctggggcggaagtctccatatccacttaatgtccaaggatcracgaacaaactttgggtttagttcaagacatcaccttatacaaagaaataaatttagagttagaaaagtgcttttacactaaaaactaggattagttgca

SEQ ID NO: 17984 - DNA, 201 bp, Homo sapiens
acccaaagtccgccgcaggaggagccggcgccgcgctcacctccgcccggtaagctgcgcccgccacgctccgcacacaccgggccgcagcccgcggggtmgcgttcgctgcaccccggcctgcagtccccgctgctcccgccgccgcctctgacggggacccggtggccctacaggctacgtccccgggcgcccggctct

SEQ ID NO: 17985 - DNA, 201 bp, Homo sapiens
tcagaagagtttgttagtaggttcttggagtcttcagtgttcctgttctagcctgtgatcttaaaaatttgaataaactatgcaatggcctgtctgttctycatctgaacctttggagtctaagaatctctcttcctacccaggtcatgtgaccaaacacttaggaattatttctaaattataaaatcttgcatgaagata

SEQ ID NO: 17986 - DNA, 201 bp, Homo sapiens
ggttaatcagaagatgacatttactgttagaccaatcagcttttacctacctgaaggaacgatcaataatagttattacatctccatgttttagccgtacwggctcatcaataacagacccatttacttgtgttggatttgtggaactgaaattatgtaatattgcctgcaagtgaaaagaaggggaaatatgtaactaat

SEQ ID NO: 17987 - DNA, 201 bp, Homo sapiens
cgtctctactaaaaattgcaaaaattagccgggtgttgtggcgcgtgcctgtaatcccagctacttggtaggctgaggcatgagaatcacttgaacccggraggcggaggttgcagtgagccaagatcacaccactgcactccagcctgggtgacagagcaagactctgtctcaaaaacaaacaaacaaacaaacaaaaag

SEQ ID NO: 17988 - DNA, 201 bp, Homo sapiens
gtagtcccagctactcaggtggccgaggcaggagaattgctggaacccgggaggcagaggttgcagtgagcagagattgcaccactgcactctagcctggrcaataaagcgagactctgtctcaaaaaataaaaataaaaacaataaaaaattgttttctttaccaaaccactcgtatatgacttttaaagactgtttgag

SEQ ID NO: 17989 - DNA, 201 bp, Homo sapiens
tgtattctaatgtcagactaaccaatcagatttgcttccgaagcaccacttcttcttttggaacatatcatctgtaaaatatcatgttgacttcggctgakagacactctctttgaaggcaggttgccactctttctccctcctctcttaggaacctctgtctgagatttgctgctggaagcaggggctgttttgcaggac

SEQ ID NO: 17990 - DNA, 201 bp, Homo sapiens
tgtgtccactgggtctggttgtgatctgcaggctattttggtagttttctcgtgagtcgtgggcttgtcagtgcatactggtgtctggaagagctctttcmagccagccaggtcttctaggggttgggccttttccttagtttttgggtgcctcttgctaccagttacacttgctgctgggtccagtttctgttttgcagt

SEQ ID NO: 17991 - DNA, 201 bp, Homo sapiens
ttgaggcttctcttgggccgttgctttgtgtttgttggggtgtccgctgggtctgattgcggagatttgcagagtatttttttggtagttttctcatcagycgtggggttatcagtgcatggtgtctggaaaagctctctgaagccagtcagttcttctagagcctgggccttttccttacgagtttgtagccgtctattg

SEQ ID NO: 17992 - DNA, 201 bp, Homo sapiens
tgtggcttgaagattgttggggtacccactgggtctggttgtggagatctgcaggctattttggtagttttctcatgagtcgtgggcttgtcagtgcataytggtgtctggaagagctctttcaagccagccaagtcttctaggggttgggcttttcccttaggagttcttggctgcctcttgctaccagttacacttgct

SEQ ID NO: 17993 - DNA, 201 bp, Homo sapiens
gtctcttgctgccaggtaaatttcctagcaggtccagtttctgcactggagtttccacaaatgtgttgatatttttctcatcacttactgctggttttggkgtgtccatggctttgcctgctgatggtgttcgtttcctgagtgctaaaaattcttcctctacgtctgctttcctgaggcttctcttgggccgttgctttg

SEQ ID NO: 17994 - DNA, 201 bp, Homo sapiens
tccattcatccgtgcgctcatccattcattcgtgtttaccgagtgcctgctcagtgttgggacagacgaggatagttgttcctgccaccgtgccctggagracataggcaaacaaacgacgacacagtgtggcaagtgtcacagttaaggctgctgtagggtggctgtgggtggtgacagacctcaaggcttcattctgca

SEQ ID NO: 17995 - DNA, 201 bp, Homo sapiens
gcggtcgaggctgcagtgagctgagatcgcgccactgcactccagcctgggcgacagagcaaagccctgtctcaaaaaaaaaaaaaaaaaaaaaaaaaaaatcgaaaccttcctcttcagtgcatacatcttaccaaacacaaaaacaaccaattatataaagtagtttggtgtgtcttttcctgctatacgtgtattctc

SEQ ID NO: 17996 - DNA, 201 bp, Homo sapiens
tattatatattactatataacatatagtatatactatataatattatatattataatatattataattatatatgattatatataatatattataattatrtattatataagtgatatatataatatataattatatattacatatatatgagacactgtagaatacagttttcaattacacaaggcagattagtaagata

SEQ ID NO: 17997 - DNA, 201 bp, Homo sapiens
atatactgtatacagtatatactatatggtatatataatatatattattatattatatattactatataacatatagtatatactatataatattatataktataatatattataattatatatgattatatataatatattataattatatattatataagtgatatatataatatataattatatattacatatatatg

SEQ ID NO: 17998 - DNA, 201 bp, Homo sapiens
gtaaccccccacgagctcagaactactgactgcgtcatcagttttctcacaaatgggccataggacctgtcgatgaactgaggctccacttggcatgtgcrccctcttggctggtggatacttagggtggatctgagagcctagattcaccctaggtaaattcatggtacaggcacacatggtatattcacagattctgca

SEQ ID NO: 17999 - DNA, 201 bp, Homo sapiens
tttaaaacattgaaacattatgtgtggacatagaaaggaggagtctgcagcagcagatttcaccttagagtagggggacgacagccagagaactctctaaagacatgcacttgggtctcagcctgagccacccagtgaccagaatgcatgagctgtaaaaactcctccaggtggttctgagtcaattcacaggagcccagt

SEQ ID NO: 18000 - DNA, 201 bp, Homo sapiens
ctttaaaacattgaaacattatgtgtggacatagaaaggaggagtctgcagcagcagatttcaccttagagtagggggacgacagccagagaactctctaaagacatgcacttgggtctcagcctgagccacccagtgaccagaatgcatgagctgtaaaaactcctccaggtggttctgagtcaattcacaggagcccag

SEQ ID NO: 18001 - DNA, 201 bp, Homo sapiens
tcatttacagggagtaaatgaattcctattcctttaaccatcactgctaaggcagaacaggaaattgccatttctggagtttccccaaacttctctgcatrcagtgggagcctctctatctaacagtccagacagtttccccttctcaagaatacacattccttattgatattgttctgatagttaaaatagtgacataga

SEQ ID NO: 18002 - DNA, 201 bp, Homo sapiens
agaattaaatttatattatatttttgtgaattgctcacaaaaagggagcaattcaacctatttttattttagctaaaccaagtattccccagaagaacacyaatggaatctaatcattcttatggatttgtccacatgcttgtaattatgagtggctcaacttgatgtgatttcagtagcacttaaagttcattagcttag

SEQ ID NO: 18003 - DNA, 201 bp, Homo sapiens
caccgagcacggctctccctccctcctcagcctctcaagatggtagatgcacccacctgcaaacttttctctccgacagaaaggcctcttcttcaggactaactgacctaccgcaggctactgcccctggaacttgccagcaaattcactcccgggatccatgtcaaatcagggttgccagaggaaagtcagggcatgtat

SEQ ID NO: 18004 - DNA, 201 bp, Homo sapiens
ccaccgagcacggctctccctccctcctcagcctctcaagatggtagatgcacccacctgcaaacttttctctccgacagaaaggcctcttcttcaggactaactgacctaccgcaggctactgcccctggaacttgccagcaaattcactcccgggatccatgtcaaatcagggttgccagaggaaagtcagggcatgta

SEQ ID NO: 18005 - DNA, 201 bp, Homo sapiens
accaccgagcacggctctccctccctcctcagcctctcaagatggtagatgcacccacctgcaaacttttctctccgacagaaaggcctcttcttcaggactaactgacctaccgcaggctactgcccctggaacttgccagcaaattcactcccgggatccatgtcaaatcagggttgccagaggaaagtcagggcatgt

SEQ ID NO: 18006 - DNA, 201 bp, Homo sapiens
gaccaccgagcacggctctccctccctcctcagcctctcaagatggtagatgcacccacctgcaaacttttctctccgacagaaaggcctcttcttcaggactaactgacctaccgcaggctactgcccctggaacttgccagcaaattcactcccgggatccatgtcaaatcagggttgccagaggaaagtcagggcatg

SEQ ID NO: 18007 - DNA, 201 bp, Homo sapiens
cttctagtgactgggcctcttccttaggcgttcttggccacttcttcattccagttacacgggctgctgggtccaggatctgctttggagactccttaaaygttctgatgctcttgccatctcctgctggctctctgtgcgtgtgcgtggtctcccctgacgtccgtgtgaacttgccgactgctaggagctcttctttca

SEQ ID NO: 18008 - DNA, 201 bp, Homo sapiens
ttctcctttctgggatgagagacgtgcagatctgtgtggtccaagtttgaatactagggccatcctgcctctttagaattctgggacgacctctcttgccwgatgctgttcctctgccctaatggaatgtggcgtcacagtgcagggctgaggtcagatccactcttcttagtggacacgaccttcagttttatagagcaa

SEQ ID NO: 18009 - DNA, 201 bp, Homo sapiens
cttgccttggcttctgcataaggttagtaagaagcaaagcatggccaggactccagggaaatgaatggacgaagaccaagaaagccagatggcataaccasatagcaaaaccaagacatcatgggccactttgatgctcaagccaccacccactgtcattaaccgggacagggagggggtggtgtgttttatgaatggact

SEQ ID NO: 18010 - DNA, 201 bp, Homo sapiens
tgggaatactccaagtatgcctcgtcctcgcttgccttggcttctgcataaggttagtaagaagcaaagcatggccaggactccagggaaatgaatggacraagaccaagaaagccagatggcataaccagatagcaaaaccaagacatcatgggccactttgatgctcaagccaccacccactgtcattaaccgggacag

SEQ ID NO: 18011 - DNA, 201 bp, Homo sapiens
gctgctggaagcaggggctgttttgcaggacctacggcgttgatcactggcaactggagttttcctaggactaggagctggagggcttataaccaagcttkgtgccttcacttccacatggatttctgaacctgactcttgttttcctgatggttgaggctgttcctgacaagacaaaattgtttacaagaagccttaaca

SEQ ID NO: 18012 - DNA, 201 bp, Homo sapiens
aaatgaagatgaacgagttatatctacaagtctgaagctggagaaagatgtctgggcttcaaaggagatttcggaggcagcggctcacaaggaagcgatcytgaaatcgtggctgaaggtgctgagtgctcagtctctccaaggatgatgatgctttacagagtactggtgtcacttcctgtactgggtggcatcgggctg

SEQ ID NO: 18013 - DNA, 201 bp, Homo sapiens
tgggtaaccccaactagcctgggctggggggccggggtagctcagcggtcttccgtatggctgtcgtcttccaacaggctcgtgtgggtgaaggcaggcayagacggtgcacacacatggcccattgcttccccgaccaacctggaatccaaaggaagaggcaggcgagcaaagcgggctgtacagaggagggggcagagg

SEQ ID NO: 18014 - DNA, 201 bp, Homo sapiens
gctggctgggcttattcacattcacgtctggggattggctggtagttgggtaaccccaactagcctgggctggggggccggggtagctcagcggtcttccrtatggctgtcgtcttccaacaggctcgtgtgggtgaaggcaggcacagacggtgcacacacatggcccattgcttccccgaccaacctggaatccaaagg

SEQ ID NO: 18015 - DNA, 201 bp, Homo sapiens
atggaatgtggcgtcacagtgcagggctgaggtcagatccactcttcttagtggacacgaccttcagttttatagagcaagagggtctcatcttagaataygtctttaagtgactgatttttaatcatttacttatttgtttgtttatttatttattgagatggagtctcgctcagtcgccaggctggagtgcaatggcac

SEQ ID NO: 18016 - DNA, 201 bp, Homo sapiens
tttttttttttttttttttgagacggagtctcgctctgtcgcccaggctggagtgcagtggcgggatctcggctcactgcaagctccgcctcccgggttcmcgccattctcctgcctcagcctcccaagtagctgggactacaggcgcccgccactacgcccggctaattttttgtatttttagtagagacggggtttcac

SEQ ID NO: 18017 - DNA, 201 bp, Homo sapiens
tctcctgcctcaccctcccgagtcgctgggactataggcatatgccaccacgcccagctaatttttgtattttgggtagagatggggtttcatcctattgrtcaggctggtctcaaaatcctgaccttaggtgatcggcctgcctcagcctcccaaagtgctgggattacagacatgagccaccgcacccggccttattag

SEQ ID NO: 18018 - DNA, 201 bp, Homo sapiens
gctctgttgcccaggctggagtgcaatgggcatgatctcggctcactgcaacctccacctcctgggttcaagcaattctcctgcctcaccctcccgagtcrctgggactataggcatatgccaccacgcccagctaatttttgtattttgggtagagatggggtttcatcctattggtcaggctggtctcaaaatcctgac

SEQ ID NO: 18019 - DNA, 201 bp, Homo sapiens
cattcacttcctgaaatattctcgttaaaatttttattagcagtttttgctgttattgttgttgtttgttgttgttgagatggagtctcgctctgttgccyaggctggagtgcaatgggcatgatctcggctcactgcaacctccacctcctgggttcaagcaattctcctgcctcaccctcccgagtcgctgggactata

SEQ ID NO: 18020 - DNA, 201 bp, Homo sapiens
tataacagcttacattatagcaaaatgccccattacacaggcatcaaatgaatttcttatcacttagtcatctctgctaaaacaaaacaaaactcttcatkactggactttcgtcatacttctctccacacactagtaacctctctaacaactccaacaattatgttgactgcagaatacacattccctgtatgtactgct

SEQ ID NO: 18021 - DNA, 201 bp, Homo sapiens
ccttccagacttccgtattctactttcattgatcttggacctacaagtcggttttgtagctccatttttggagttttatttttttcatgatcttctttccrttttcatctcctttaaatagtttctactaatataggaaaactacggatgtattgttctttattggttatgtttcttgttcttggacacaaaggcattccc

SEQ ID NO: 18022 - DNA, 201 bp, Homo sapiens
ggttgcccacacttttcttcccaactttcttctctgttacgtaagtcagggacaatgtatagttccttccagacttccgtattctactttcattgatcttrgacctacaagtcggttttgtagctccatttttggagttttatttttttcatgatcttctttccattttcatctcctttaaatagtttctactaatatagg

SEQ ID NO: 18023 - DNA, 201 bp, Homo sapiens
aaaaaaaatagaaaagagagagagacagaaagaaagaacgaaggaaagaaagaaagaaaaagaaagaaagaaagagagagagaagaaaaagagaggagaaraagaaagaaagagagaagaaaaaggaagaaagaaagaaaaacattttgagttacttctttgaaacattttgagttacttcttttctgttgttgctgttgt

SEQ ID NO: 18024 - DNA, 201 bp, Homo sapiens
ctactcggaaggctgaggcaggagaatcacttgaacccgggaggcagtggttgcagtaagccaaggtcacgccactgcgcttcagcctgggcaacagagcragactccatcaaaaaaaaaaaatagaaaagagagagagacagaaagaaagaacgaaggaaagaaagaaagaaaaagaaagaaagaaagagagagagaaga

SEQ ID NO: 18025 - DNA, 201 bp, Homo sapiens
atacgaaaattagtcgggcgtagtggcacacgcctgtagtcccagctactcggaaggctgaggcaggagaatcacttgaacccgggaggcagtggttgcartaagccaaggtcacgccactgcgcttcagcctgggcaacagagcgagactccatcaaaaaaaaaaaatagaaaagagagagagacagaaagaaagaacga

SEQ ID NO: 18026 - DNA, 201 bp, Homo sapiens
gggaggccaaggtgggtggatcatgaggtcaggaattcaagaccagactgaccaatatggtgaaaccccatctctactaaaaatacgaaaattagtcgggygtagtggcacacgcctgtagtcccagctactcggaaggctgaggcaggagaatcacttgaacccgggaggcagtggttgcagtaagccaaggtcacgcca

SEQ ID NO: 18027 - DNA, 201 bp, Homo sapiens
aatcccagcactttgggaggccaaggtgggtggatcatgaggtcaggaattcaagaccagactgaccaatatggtgaaaccccatctctactaaaaatacraaaattagtcgggcgtagtggcacacgcctgtagtcccagctactcggaaggctgaggcaggagaatcacttgaacccgggaggcagtggttgcagtaag

SEQ ID NO: 18028 - DNA, 201 bp, Homo sapiens
aattaaaaacaggcgggacgcggtggctcacgccggtaatccccgcactttgggaagctgaagcaggaagatcccttgagcccgggagttcagaaccagcytgggccacctggagagaacccatctctacaaaaaattcgccaggcgtggtggcgcccctgtagttctagctactgggacagctgaggtgggaggatcgct

SEQ ID NO: 18029 - DNA, 201 bp, Homo sapiens
gcgcgcccgcccaattcaaacgaaaacgaagattcaaattctggcgctaagcgctgcgattgaacgggaaagcgcggcatgggaccaataggaagggagcscagggcgtgggcggggagggggcggggaaaccgggctcgcggggcggggctggcgtgtccgcgggcgagccactcacgcatccggaggaaaatacctggg

SEQ ID NO: 18030 - DNA, 201 bp, Homo sapiens
cacccaaagtccgccgcaggaggagccggcgccgcgctcacctccgcccggtaagctgcgcccgccacgctccgcacacaccgggccgcagcccgcggggycgcgttcgctgcaccccggcctgcagtccccgctgctcccgccgccgcctctgacggggacccggtggccctacaggctacgtccccgggcgcccggctc

SEQ ID NO: 18031 - DNA, 201 bp, Homo sapiens
ggccgcagctcacctgggacgatccggcccgcaaggccacttgtcgaaccaccgctcgtcaagtcgcacccaaagtccgccgcaggaggagccggcgccgmgctcacctccgcccggtaagctgcgcccgccacgctccgcacacaccgggccgcagcccgcggggtcgcgttcgctgcaccccggcctgcagtccccgct

SEQ ID NO: 18032 - DNA, 201 bp, Homo sapiens
ctgtatacagtatatactatatggtatatataatatatattattatattatatattactatataacatatagtatatactatataatattatatattatawtatattataattatatatgattatatataatatattataattatatattatataagtgatatatataatatataattatatattacatatatatgagaca

SEQ ID NO: 18033 - DNA, 201 bp, Homo sapiens
atactgtatacagtatatactatatggtatatataatatatattattatattatatattactatataacatatagtatatactatataatattatatattwtaatatattataattatatatgattatatataatatattataattatatattatataagtgatatatataatatataattatatattacatatatatgag

SEQ ID NO: 18034 - DNA, 201 bp, Homo sapiens
gctaatacaaatgaagacaataacagagattcatttagcagaatggatttttaaatgacccaactaatacgttgtctacaagagacacaattttgattcaragacacaatcttttaaaataaaagcatgggaaaagatataccatgcaaacagcaagcagaggggaactggagtactgtactaacatgagacaaaatcatc

SEQ ID NO: 18035 - DNA, 201 bp, Homo sapiens
gccgtctctactaaaaattgcaaaaattagccgggtgttgtggcgcgtgcctgtaatcccagctacttggtaggctgaggcatgagaatcacttgaacccrggaggcggaggttgcagtgagccaagatcacaccactgcactccagcctgggtgacagagcaagactctgtctcaaaaacaaacaaacaaacaaacaaaa

SEQ ID NO: 18036 - DNA, 201 bp, Homo sapiens
accaaggatcaagtgttcatgtggcatatggactcatgggtacagtccagtgtttacagcaaattgtttgtaggacactctgaaaacagagtatcaacacytgagaactaccgctatgtttaatgattaccagtgatttattccacatgaccaaactcatatgatacagttgattgtagttcagaattaaactccatgtga

SEQ ID NO: 18037 - DNA, 201 bp, Homo sapiens
aatgccttaactatagccttgtaactctaaaagaaaataaaacaatccttatgggtcgacgtggtaatgtatccagaatctttgtaattggctattctgayggtgcctgcaggtgattacgcagtgctgtaagcgtgggtgtctgggaacttctgcacgaaaaggacaacatcaaggactcccccgactcggtcgcatcag

SEQ ID NO: 18038 - DNA, 201 bp, Homo sapiens
gcacggaggctggtgacgggctcctgagacccataggcctccctgctaggatctagaggccaaatgccttcatgcttctcaaagtcttgggtgctcagttytagattttaagtacaaataacacgtacccacattttagaaaatgacaaagagctgcccatttttagtactgtcaagtaataatatatatttttgaaaatc

SEQ ID NO: 18039 - DNA, 201 bp, Homo sapiens
tttcctgagacttctcttaggccattgctttgtgcttgttggagtgtccactgattctggtggtggagatttgcaggctattttggtagttttctcatcastcattgattcctcagagggacctggtgtctggaagagctctttgaagccagccaggtcttctagtgactgggcctcttccttaggcgttcttggccactt

SEQ ID NO: 18040 - DNA, 201 bp, Homo sapiens
tctaatcattcttatggatttgtccacatgcttgtaattatgagtggctcaacttgatgtgatttcagtagcacttaaagttcattagcttagatagtctstggctggaggagggttggagggcagacgcatcccccactgaccaggaactctcacatagtgagcatgtgtctcagggacatcccaacttctgttccttct

SEQ ID NO: 18041 - DNA, 201 bp, Homo sapiens
gagcatgtgtgtgttgggcgtctcctgggtgcttgtgtgtgagaagaggctggaacgcccccggcagaacacaccaggcctggctcagccttgggcctggytgctctgtgtttaggaatcatcctagttaaaagattcgctttcacccttctttggtttcattctgaggaagcagcaccttccagactgtgaattcggtaa

SEQ ID NO: 18042 - DNA, 201 bp, Homo sapiens
aagtaaaaacagcttgtatttaatgggaatgtcctattacatggaaattcacttggaaactgaagctcagagaagttaccataccatggtggaaatgggtkggtatttgttctcaaatccagtcagcctaggggaatgggcagtatttgtcagatctctccctcccccagtaccaaggagggttgtgtagaagtggtgttc

SEQ ID NO: 18043 - DNA, 201 bp, Homo sapiens
ataacagacagtatggcccacgaagccgccatatttactgcctggtccttgacagaaaaagtttgctaattgctgacctggattaaaatccacagaacctyttctatgcagggatgtgcttccctatgtcctggccatgcctggtcccagcaccacctgttttagccagacctgtgtctgggccaagctcagcaaagttct

SEQ ID NO: 18044 - DNA, 201 bp, Homo sapiens
agcataacagacagtatggcccacgaagccgccatatttactgcctggtccttgacagaaaaagtttgctaattgctgacctggattaaaatccacagaaycttttctatgcagggatgtgcttccctatgtcctggccatgcctggtcccagcaccacctgttttagccagacctgtgtctgggccaagctcagcaaagt

SEQ ID NO: 18045 - DNA, 201 bp, Homo sapiens
atacttaagttatatacattacattaaatatatttaatttatattatacacaatatattagattatatctatagttatcatatttatatataaatacataygcttatatataaatataggtaacttttcccctaagttgctcctatagttgtttttggctctaggggacatggaagcaagcaggcagatgaggggcccagg

SEQ ID NO: 18046 - DNA, 201 bp, Homo sapiens
atatatttatatagaacttaggttgccaatgatgaaaacctagtgaataatatttagtatatttatatattttatatagttatgaatatataatatacttmagttatatacattacattaaatatatttaatttatattatacacaatatattagattatatctatagttatcatatttatatataaatacatacgcttat

SEQ ID NO: 18047 - DNA, 201 bp, Homo sapiens
attttatatacatatttgtgtataaattttcatagataatatttatatatttatatagaacttaggttgccaatgatgaaaacctagtgaataatatttartatatttatatattttatatagttatgaatatataatatacttaagttatatacattacattaaatatatttaatttatattatacacaatatattagat

SEQ ID NO: 18048 - DNA, 201 bp, Homo sapiens
tttttatcattgccaacctaaatctatataaacatataatatattttatgtatatattatttttacttaaatatgtatgtatatatttataacattttatrtacatatttgtgtataaattttcatagataatatttatatatttatatagaacttaggttgccaatgatgaaaacctagtgaataatatttagtatattt

SEQ ID NO: 18049 - DNA, 201 bp, Homo sapiens
gcccattgcttccccgaccaacctggaatccaaaggaagaggcaggcgagcaaagcgggctgtacagaggagggggcagaggtgcttctgagaggggtatyggacggtgctcagggagcctcaggggccacctagcgttgtgttacctccaaagcagtgctttctcggagtaacagagggcgggcccagagccaaatagct

SEQ ID NO: 18050 - DNA, 201 bp, Homo sapiens
gtgaaggcaggcacagacggtgcacacacatggcccattgcttccccgaccaacctggaatccaaaggaagaggcaggcgagcaaagcgggctgtacagakgagggggcagaggtgcttctgagaggggtatcggacggtgctcagggagcctcaggggccacctagcgttgtgttacctccaaagcagtgctttctcgga

SEQ ID NO: 18051 - DNA, 201 bp, Homo sapiens
ctggggggccggggtagctcagcggtcttccgtatggctgtcgtcttccaacaggctcgtgtgggtgaaggcaggcacagacggtgcacacacatggcccrttgcttccccgaccaacctggaatccaaaggaagaggcaggcgagcaaagcgggctgtacagaggagggggcagaggtgcttctgagaggggtatcggac

SEQ ID NO: 18052 - DNA, 201 bp, Homo sapiens
actagcctgggctggggggccggggtagctcagcggtcttccgtatggctgtcgtcttccaacaggctcgtgtgggtgaaggcaggcacagacggtgcacrcacatggcccattgcttccccgaccaacctggaatccaaaggaagaggcaggcgagcaaagcgggctgtacagaggagggggcagaggtgcttctgagag

SEQ ID NO: 18053 - DNA, 201 bp, Homo sapiens
ataagttttaaaatatattccattaacattgtttttcttgacttgaactgcttttattatgcagtttttttacacttaaataatgtgatcttttcatacasaagttcctaatgcatttttaagctaattcataataaaatttcttcatcgatgcacacattttcacaaactaaaaaatgtcactcagaaaaagtgaatcca

SEQ ID NO: 18054 - DNA, 201 bp, Homo sapiens
gattcaaattctggcgctaagcgctgcgattgaacgggaaagcgcggcatgggaccaataggaagggagcgcagggcgtgggcggggagggggcggggaarccgggctcgcggggcggggctggcgtgtccgcgggcgagccactcacgcatccggaggaaaatacctgggtgcatccccggcgagggcggctggcggagg

SEQ ID NO: 18055 - DNA, 201 bp, Homo sapiens
agtaacaaacaaaatgggcaatgtaaacgatcttgcattttgcaaagaacttttggaagtattaaacatgtaactattagatctttaaaacagagagtatrtaaaaacaagggaaaacactagaacacaaatcgaattaccttttatatgaaaagctatacttaaaagacacaaaggaatacttacatcaattttggataa

SEQ ID NO: 18056 - DNA, 201 bp, Homo sapiens
tcaaagactagacattagtcaaatgtccatcaagaatgaatgaattctgtatagttatgtatattattgtatatattaaacatttttttttcagtgaaatmcttatgccatgagaaggaacaaactacagagatgtccaacatgctatgaatctcacacacagaaaagcacaagccaggcacaaatgtatacattcttgta

SEQ ID NO: 18057 - DNA, 201 bp, Homo sapiens
gccaccagataatgcaattcccaaatgttagctctacgtgttggggttatcctaatcatgggtttgcaaaaagctcgcaacatgctctaatagactttttkgctaaaagtgtaagaccaacttagtgctctgattttgaacaataaagaggaaatatcattttagattattttaatacgtctaagttcaactcgtttttat

SEQ ID NO: 18058 - DNA, 201 bp, Homo sapiens; identical to SEQ ID NO: 17989

SEQ ID NO: 18059 - DNA, 201 bp, Homo sapiens
ttttgctatgtcaccctggttacttacaataaagaagccaaaagtgtacacaggtcatttacacacattaacggagtctttctttctatataagtcaatgratgccaatgttagttcaactgctgattgaaatctccctttcaattagaacagagaagacggaaatggtattttgtgccaggaacatttgttttagagaag

SEQ ID NO: 18060 - DNA, 201 bp, Homo sapiens
ttccgggctccatcatctggattctgaatgtccatctctggggaggtcttcatgggcttcttttcatttctgtttatttctattctttctgctaatacaawgacctcagttatttgctgttctgcctcagtcttattttggcgtctggagcgcagggatattccctaaagaaatgagaagacatccacaaaattccaataa

SEQ ID NO: 18061 - DNA, 201 bp, Homo sapiens
catgagaaccttcgcactcttctgccctccgctctcctctgccaccttaggctgggagctctcattctgtctagcagacctcaagcaccttttgttctcastgactttgtctctaggtatgggtttccgggctccatcatctggattctgaatgtccatctctggggaggtcttcatgggcttcttttcatttctgtttat

SEQ ID NO: 18062 - DNA, 201 bp, Homo sapiens
aacattctgtgtcttttaaaacagggaaacagtaaatggcttaccttctttggattttctgcacatctcttgacactccgcgttactctctgcacagattygctctccaaagtgcttgctgcaggctggctttttgtctttcttgatctcaggcacatggagtctgaatttcctgcttctcctttccctttctgattctgc

SEQ ID NO: 18063 - DNA, 201 bp, Homo sapiens
cccagcctggaggacaggcatgggggtgagggaacccacaggcaagaagcctcccttaagctgagctcaggactggatgaaatgatcttggtggggcaggwgggaaagttccaggcagggaaaacagcagggagtgtgtggtggttggaggtgcctgcctaagggaggcaggagatggtaggtacagagttagtgtaagaa

SEQ ID NO: 18064 - DNA, 201 bp, Homo sapiens
tgccccagcctggaggacaggcatgggggtgagggaacccacaggcaagaagcctcccttaagctgagctcaggactggatgaaatgatcttggtggggcwggagggaaagttccaggcagggaaaacagcagggagtgtgtggtggttggaggtgcctgcctaagggaggcaggagatggtaggtacagagttagtgtaa

SEQ ID NO: 18065 - DNA, 201 bp, Homo sapiens
agatgagtcaagcaggtatccaagtccaattacccggctcagggcttgacatcacagatgtgggacttgcctgagatggggctgatgagcaggaagctgaytggggcccttgcagggcaacacacaacaaaccaatcaaacctccttcctgaaatcactgtgcgcgctgtgggggtggcagcgggggagggggggcgtggc

SEQ ID NO: 18066 - DNA, 201 bp, Homo sapiens
catcaaatttggggagttttcagcaattatttcttaaaatattttctctgcccctttctctcattcttctccttttgggattcccacaatgcttatttttkcccacttaatggtgtccaccacaggtttgttaggttatgtttacttttcttcaatctttttttttttctatttcccatattcaataatttccattgtcct

SEQ ID NO: 18067 - DNA, 201 bp, Homo sapiens
aacagatgtgctatcatcctggcttcgttgttcctttatggaccacaggcatagtagatttagcataattcttaagggccctaggatttagaaatttaaawgagcattggcttcaacttaaagtcaccagctgcattagctccttaatgcacagagtcagcctctcctttgaaactttgaagccaggcattgacttctgtc

SEQ ID NO: 18068 - DNA, 201 bp, Homo sapiens
tcagcacttgttgcttcagcttgcacttttatgttatagagatggcgtctttccttaaaccttatgaaccaacctgtgctagcttcaaacttgtcttctgyagcttcctaacgtctctcaatccttatagaattgaagagaatcagggccttgctctggattaggctttggcttaatggaatgttatggctggtgtgatct

SEQ ID NO: 18069 - DNA, 201 bp, Homo sapiens
tttatgttatagagatggcgtctttccttaaaccttatgaaccaacctgtgctagcttcaaacttgtcttctgtagcttcctaacgtctctcaatccttayagaattgaagagaatcagggccttgctctggattaggctttggcttaatggaatgttatggctggtgtgatcttatatggagatcactaaaactttctcc

SEQ ID NO: 18070 - DNA, 201 bp, Homo sapiens
tctgggaggccgaggcaggcagatcacctgaggtcaagagttcgagaccagcctggccaacatggcgaaaacccgtctctactaaaaatacaaaattagcsaggcatggtggcccatgcctgtaatcccagctacttgggaggctgaggcaggagaattgcttgaacctgggaggcggaggttgcagtgagccaggatcgc

SEQ ID NO: 18071 - DNA, 201 bp, Homo sapiens
ctttcattgtctttacggaacacatacactctttccctatggtatataagctctgatttgcctttcattgtctttacggaacacatacactctttccctayggtatataagctctgattttagggagtaacagttgggaaatctacctgtctcgctgccacctaagactaggcttctgtacatgagttctctaataaacca

SEQ ID NO: 18072 - DNA, 201 bp, Homo sapiens
gagagggttgactggaattcattaagcatccaccatactgtcctgatttggctccatctgacttctttttatttcctaatctcttttttttttttttttttgagacagagtcttgctctgccgcccaggctggagtgcagtggcgcgatctcagctcacctcaacctctgcctcccgggttcaagcgattctcccgcctca

SEQ ID NO: 18073 - DNA, 201 bp, Homo sapiens
caagacattttgcttgtcggttttctggagaaccaaagagtaacaacacctgcttattacgagtgttttgataaagttagctgaagctttcagaaaaaaaacccagaaaagcttcaccagagagtccttctccaccacaataatgttcctgctcattcctctcatcaaacaaaggcaattttgtgagagggttgactggaa

SEQ ID NO: 18074 - DNA, 201 bp, Homo sapiens
ttggcattaaggtaatgctggcctcatagaatgaatcaggaagtatttctctgcttccattttctggaagagattgtagagaattgctataatttttttttcttaaattcttggtataattcaccagtgaacccatctgggattaatgtgttctggtttggaaggttattaagtactgattccattttttagtagatatag

SEQ ID NO: 18075 - DNA, 201 bp, Homo sapiens
atctgatggactatattaattgacctttaatattgacccagccttacatgcctagaataaatcccacttgatcatagcatgtaattttttatacattgttrattcaatttaccaatattttgtgggaatttttgcatctatgttcatattggtctgtagttttgtttttcttgcaatgtctttgtctggtttttggcatta

SEQ ID NO: 18076 - DNA, 201 bp, Homo sapiens
ttcctagtttgctgagagctttatcaggaatgggtgttggattttatcaaattctttttctgcatctattgatatgatcatgttattttttcctgttgatytgatggactatattaattgacctttaatattgacccagccttacatgcctagaataaatcccacttgatcatagcatgtaattttttatacattgttaat

SEQ ID NO: 18077 - DNA, 201 bp, Homo sapiens
caatatgatgttgaaaaggaatagtaagaggggacatccttgccttgttcctaatcatcatgggaaagcttccagtttgtcaccaataaggacaatgtttrctgtaggttttttgtagatgttctttatcaagttgagtaaattcctcctctattcctagtttgctgagagctttatcaggaatgggtgttggattttatc

SEQ ID NO: 18078 - DNA, 201 bp, Homo sapiens
ttgttgacaattcttttggattttctacataaacaattatatcatttgtgaacaaagactgttttatttcttccttcccaatctgtatacattttatttcyttgttttatcttattgcattagcaaagacttccaatatgatgttgaaaaggaatagtaagaggggacatccttgccttgttcctaatcatcatgggaaag

SEQ ID NO: 18079 - DNA, 201 bp, Homo sapiens
tcttaaagaaaaaaaaaaaaagatcactgatcatagaagcaaacacatgctcttggaaaaatggctcttatagagttgcctgactcagggttgccacaaaacttcaatttgtaaaaaatgcaatatctgcaaagtacaataaaatgaagcacagtaaaataaggtatgcctgtctttgtccattctttcactaataccaca

SEQ ID NO: 18080 - DNA, 201 bp, Homo sapiens
tgagcccaagagctggaagtttgcagtgagctatgatcacaccactgcacttacagcctgggtgacagagcaagaccttgtcttaaagaaaaaaaaaaaaagatcactgatcatagaagcaaacacatgctcttggaaaaatggctcttatagagttgcctgactcagggttgccacaaaacttcaatttgtaaaaaatgc

SEQ ID NO: 18081 - DNA, 201 bp, Homo sapiens
agagagttcccatacccctgtccaccaccacgcctctcctcctgttattaacatcttgctttagtgtggtacatttgttacaattaatgagccaatattgrcacagtattattaactaaaattcatagttaatattagggttcactctgtgttgtgcattctatggcttttgacaaatgtataatgacatgtatctaacat

SEQ ID NO: 18082 - DNA, 201 bp, Homo sapiens
tattttaaatatttttataagctcctcacaaacatcattttaatagatatttaaataaatagaatttaacagatctttaaataaatatatggtgacctatsttttcttttaggtagttatcagcttattgctattaaaaataacactaaacttttgtttatctacagagtgtcaggtaagcaagtgaacattttgatgcaa

SEQ ID NO: 18083 - DNA, 201 bp, Homo sapiens
atgataatacctctgtagtacctcctagagaaaaaaaatatagcaccaagtgctatagtacacatagcaaatctgcaaaagtgctagctatcattattatmtgaggcttttgacccagctctcagagaagctggaaatttgcatttttatgtgaaatttcctggcaactgatttaaaactttatttacatagagaatcaaa

SEQ ID NO: 18084 - DNA, 201 bp, Homo sapiens
taagggagcatgaatggaatttggagctttactgcctggttcaagtcccagctccctcacttaccacataagctgtgtgattgaggagttactttacttcyctgtgtctcggcttccttgtctgttaaatgtgggtgatgataatacctctgtagtacctcctagagaaaaaaaatatagcaccaagtgctatagtacaca

SEQ ID NO: 18085 - DNA, 201 bp, Homo sapiens
gaatcacctgaacctgggaggcggaggttgcagtgagccgagatcaggccactgcactccagcctggatcacaaagcgagactgtctcaaaaaaaaaaaaagaacctagaaaaagaagagcaaactaaacacctaaaaaagcagaaagaggaaacaagaaagattaaagtggaaataaatgttaatgaaataaagagcaga

SEQ ID NO: 18086 - DNA, 201 bp, Homo sapiens
tacaaagcccttaccatgagcttttaagtgagacactagtacaaagtttattttacagaggagaagacagatgtacagagaggcaagttgacccagccagrgaacatagctagtaagggagaactctcctgcagaacccagagcccatgctcctcactctgcactgcactgccactatttaattataatattgtctactgt

SEQ ID NO: 18087 - DNA, 201 bp, Homo sapiens
gagcgcaataatgtgatctcagctcactgcaacctccgcctcctgggttcaagcaattctcctgcctcaccctcccaagtagctgggattacaggtgcccrccaccatgcccagctaatttttgtatttttagtagagacggggtttcaccatgttggccaggctgcccttgaactcctgacctcaggtgatctactcacc

SEQ ID NO: 18088 - DNA, 201 bp, Homo sapiens
cgccagctgcctatcacctatgtcaccggctacaggcatggtcctaaggatgaggtgatgtagaggtgagttagagcttcacagtcttttattagttgccygatgactttgcccaagggtgagagggagcagtatcatcttccattttatagccaggtaaacagaggcccagagaggggaagggacaccctgctgcccgac

SEQ ID NO: 18089 - DNA, 201 bp, Homo sapiens
aaacactatcctcatcacagagtgagtgagccgaactgaaccaaggggaggatctagaatcagatgacatcgagaagttgatagcaaaagtgttagaaccrctgacatctcaataggttccacagtgattctccctttaatgagcatgaagaagtatttgctgaatgagttttgacaggaattaatgaatgcagaatggaa

SEQ ID NO: 18090 - DNA, 201 bp, Homo sapiens
aagcctgggcaacacagtgcgagaccctgcctccacaaaacataaaataaagtaaaaattagccagacatagtggcacatgcctgtactcccagctactcrgaaggctggggtgggagaatcacttgagcccaggagatccaggctacaatgagctatgattcattaagcctggatcctgatagttaatggaaacttaaag

SEQ ID NO: 18091 - DNA, 201 bp, Homo sapiens
ctaattttggctttttcctgaaactatggaaatttgccccagaaagctgaaatcagatagaaaatctgcctgcttctccttccttggtctcacttctcttycccatactcaacacaggtgggctcccctcagtgccctggtagaaaggatttccctgaaatggtgtatccaggccaggtacagtggttcatgcctgtaatc

SEQ ID NO: 18092 - DNA, 201 bp, Homo sapiens
ggtcaacaagtcctttcagcgtcttcattcccctcccttgaccatatgggaacttctggatccctgcctgccgtggacaggaggcttgtttcaggcctacctctcaagctcctctgtctgcaaaaatgcatttataaaaggataaaggaggacccgcagaatcatcaggagcactcagcttccaggaataagatccagaac

SEQ ID NO: 18093 - DNA, 201 bp, Homo sapiens
tttaaagtgaacaattcagtgggatttaggacaattcagtggcatttgtgcaaatggtgacttccatacagttctaaaacattttcatcaccctaaacagkcaccttatacccataaagcaactcctcctcattcctcacctccaacccagcccttggcaaccatcggctttccgtatcattttacctattctgggcatct

SEQ ID NO: 18094 - DNA, 201 bp, Homo sapiens
tggtgtgaacccaggaggcagagcttgcagtgagctgagatcacaccactgctttccagcctgggcaacagagtgagactctgtctcaaaaaaaaaaaaaagaacataagagatccttttagtgatggggttgttttatacattggctgtggtggtggatacacaaacctacacatgtgataatatttgcatacaaataaa

SEQ ID NO: 18095 - DNA, 201 bp, Homo sapiens
caaatttggggagttttcagcaattatttcttaaaatattttctctgcccctttctctcattcttctccttttgggattcccacaatgcttatttttgcccacttaatggtgtccaccacaggtttgttaggttatgtttacttttcttcaatctttttttttttctatttcccatattcaataatttccattgtcctgtc

SEQ ID NO: 18096 - DNA, 201 bp, Homo sapiens
ctttttagtatatcagctcactgcctttgggcctctaaagtttttaatgagaaatttacttttaatcttattgagattcccttgtatgtgagaagttgcttggtttttgctgctcttaagattttctgtttttgatttttaagagtttgattttaatgtgtcttggtgtaggtctctttgagttcattctacttggagttc

SEQ ID NO: 18097 - DNA, 201 bp, Homo sapiens
ggtccagtttcaatcttctgcacatggctagcctgttatctcagcactgtttattgaataaggagtccttcccccattgcttgtttttgttgactttgtcraagatcagatggttgtaggtgtgtggctttatttctgggttctctattctgttacattggtctatgtgtctgtttttgtacctgtaccatgctgttttgg

SEQ ID NO: 18098 - DNA, 201 bp, Homo sapiens
atttttaacttttactttaggttcaggggtacacatgcaggtttgttacacagaaaaattgtgtgtcatgggggattgatgttcagattattccattcccycaagtaataagcacagtacccaataggtagtttttcaatcctaaccctcctcccaccctccacccccaagtaggccctggtgtctattgttcccttcttt

SEQ ID NO: 18099 - DNA, 201 bp, Homo sapiens
ggccaatcgttagctgaccactaagccaactgaacagagacaacaatagcagcacagcaaaaaagtgtggaaatctgatttccagagttcccaggttctawgtagaatgtccagttttcaacacaaattatgagacacacatgaaacaggaaaatatgtccatactgagaaattaagtattaataaaaactgtccccaaag

SEQ ID NO: 18100 - DNA, 201 bp, Homo sapiens
tacctggtgtagataagcacccataagaattcataaaagagccaaaaagtaaatgaaattggtaatgaatgaatgaatgaagtgactgattgaattttaayatgtaatattcattgagagtataaaatatgctagtcacttttctaaggttatcataagtatttatttaatccttccaacaatcctttgaggaaagtacta

SEQ ID NO: 18101 - DNA, 201 bp, Homo sapiens
ttgattaatatgatgaggtgtgccaggaggaagataaggccaatggaacaaaatggaggccagaaatagacccatggatggatatttgatttataataaakatataattaagattttttaaatgaatgatgttgggtcagttgaatatccacagaaaaaattaaaatccggctgggcacagtggctcacgcctgtaatccc

SEQ ID NO: 18102 - DNA, 201 bp, Homo sapiens
ctcagctgggatggttcatcttctccaggtggtgctggctgggatctcacatatgtctgtcacgtgggactgctgagatggctgggtctgtgttcccactyggcctctcatgtcccaacaggccagcccatgcttttctgaatagcagcaacattcccagaaggtgagagatgaagctgtgaggtttctagaggcctggct

SEQ ID NO: 18103 - DNA, 201 bp, Homo sapiens
gggatggattgaacaggttgagctgaaaaacactctgaagctgttggggccatacagtcgcttaagcgagaagcaaagaggggagaataacaagaaacccygtgcatgtaggaattggggaggggaggaccaaagtgatgggggagatgtgggaaaggagtgatgatgtaaaaatccctgtttgtaggccgggcgcggtgg

SEQ ID NO: 18104 - DNA, 201 bp, Homo sapiens
gagagggagcagtatcatcttccattttatagccaggtaaacagaggcccagagaggggaagggacaccctgctgcccgaccagtccaggtctagctgtgrtaggttgttctaactcattgtcttgtgaggatgaattcccaaaacaacacaggtgactcccagccagagtgcacaggggatcctgtgtccagctggttgc

SEQ ID NO: 18105 - DNA, 201 bp, Homo sapiens
cagccagggcagggacaacccttgtgaccccgcttaagaatagggttttctcttcatgatgccttcttgtggtcaacgatggcaaaagaacaaaactggartctccatatgactctgcaggaaggaatgtgacctgaagcaaggggcttatctgcccatctggtgactcccaggtcagccccatctcaaaacaagcccgct

SEQ ID NO: 18106 - DNA, 201 bp, Homo sapiens
ttactattttattattattccctgttatgcttggctagtgggtgtttgttggggtggcgggcaccctccccagccagggcagggacaacccttgtgacccygcttaagaatagggttttctcttcatgatgccttcttgtggtcaacgatggcaaaagaacaaaactggagtctccatatgactctgcaggaaggaatgtg

SEQ ID NO: 18107 - DNA, 201 bp, Homo sapiens
caccactacgtttagggatagtttgttatgcaacaacagcaactggaataagccccaacacaggtcagcctggtgaaaaactccctggtatcattaatgtsccccctattatctccagggttattagtgtctaactaggcattatgcacaagcatcagagccaaattacagtctatatctaattactattttattattatt

SEQ ID NO: 18108 - DNA, 201 bp, Homo sapiens
gtccctcctcagggcataattggttgtgctgtgcaaaactgcaatggaagtggagtgatacgcagcaactccatcattctcacagactgccttggatgatytgtgcctctgagtttcatggaataaacctgcagttttagtatgcctcagaagatgtaatcaaggcggttcaatctggaacaaaattaagtaatattactt

SEQ ID NO: 18109 - DNA, 201 bp, Homo sapiens
gacaccactaataagcacaccccttcctccactcttagggtttttttgtttgtttatttgttttgtttttaaagaagaacggccgggcatgatagctcackctcagcattttgggaggctgacgtgggtggatcgcctgaggtcaggagttcaagactagcctggccaacatagtgaaaccccatctgtactaaaaataca

SEQ ID NO: 18110 - DNA, 201 bp, Homo sapiens
gggaggcagaattctaagatgctcaccatgagggttaatatcatgtggcaacttgactggaccatggagttctcagatatttggtcaaatattgttctagrtgtttctgtgagggtgttttgggtgagattaatatttaaattggtagactgagtaaagcagatggccctctctaatgtgggtggcccttatccaatcagg

SEQ ID NO: 18111 - DNA, 201 bp, Homo sapiens
tgatcctggttctctgcatcctggccaacatttggaacaaactattaatacatacaacaattggaagaatctcatgggagttacactgtgtaggaaaaaawgttaaccctaaaatgttacatactatatgtttctatttatataacattcttgaaatgacaaaaattatagaaatgaagaacagcgtagtggttgccagta

SEQ ID NO: 18112 - DNA, 201 bp, Homo sapiens
ctgttttcagcattggagtattaagaataaagttgctatagacattcatatacagattttagtgtgaacataagttttcatctctctaggttaaatgccartgaggacaattgctgagtcacacggaaattgcatgtttagttttgtaagaagctgccaacctgtttccagagacgctgtattattttatattctcactgg

SEQ ID NO: 18113 - DNA, 201 bp, Homo sapiens
gtatagatgtaccatggtttaacaattcatccgccgaaggactggctgttttcagcattggagtattaagaataaagttgctatagacattcatatacagrttttagtgtgaacataagttttcatctctctaggttaaatgccaatgaggacaattgctgagtcacacggaaattgcatgtttagttttgtaagaagctg

SEQ ID NO: 18114 - DNA, 201 bp, Homo sapiens
attagaagcagcaatcagcaatcagagcacagattcctgatatttggaggacagggtcccttttgcccactctggctcttttaagctgctcccagaatgcrtgcaaagtttcctaccatggagaatgggtagttgctactgcactaaaagctaaaatttagtaaaattaattgcaatttaccatccaaaccttctcttggc

SEQ ID NO: 18115 - DNA, 201 bp, Homo sapiens
gattagaagcagcaatcagcaatcagagcacagattcctgatatttggaggacagggtcccttttgcccactctggctcttttaagctgctcccagaatgygtgcaaagtttcctaccatggagaatgggtagttgctactgcactaaaagctaaaatttagtaaaattaattgcaatttaccatccaaaccttctcttgg

SEQ ID NO: 18116 - DNA, 201 bp, Homo sapiens
atgaggtgatgtagaggtgagttagagcttcacagtcttttattagttgcccgatgactttgcccaagggtgagagggagcagtatcatcttccattttayagccaggtaaacagaggcccagagaggggaagggacaccctgctgcccgaccagtccaggtctagctgtgataggttgttctaactcattgtcttgtgag

SEQ ID NO: 18117 - DNA, 201 bp, Homo sapiens
tgtactcccagctactcagaaggctggggtgggagaatcacttgagcccaggagatccaggctacaatgagctatgattcattaagcctggatcctgatarttaatggaaacttaaagagtttactaaacgctttcttggcaaagcctagctttaaaaacaacattgtcttatgaaggacaaaacaaaacaaaacagaaac

SEQ ID NO: 18118 - DNA, 201 bp, Homo sapiens
gttaacttctctctgattcttccgaagtccttcttgccgtactggtgaggcttcaggaactgactgcaggtgttcacgccaatatctatgccgggaagccsttttactcctctgttctgcaaagctctcagtaaggcatttttgtgttttagggggcggcattcatgtctggctttctgtagtgactggcctgaggatgag

SEQ ID NO: 18119 - DNA, 201 bp, Homo sapiens
tttgctgttgttaacttctctctgattcttccgaagtccttcttgccgtactggtgaggcttcaggaactgactgcaggtgttcacgccaatatctatgcygggaagcccttttactcctctgttctgcaaagctctcagtaaggcatttttgtgttttagggggcggcattcatgtctggctttctgtagtgactggcct

SEQ ID NO: 18120 - DNA, 201 bp, Homo sapiens
ttgagctttcaaggttttgctgttgttaacttctctctgattcttccgaagtccttcttgccgtactggtgaggcttcaggaactgactgcaggtgttcaygccaatatctatgccgggaagcccttttactcctctgttctgcaaagctctcagtaaggcatttttgtgttttagggggcggcattcatgtctggctttc

SEQ ID NO: 18121 - DNA, 201 bp, Homo sapiens
gcttgagcttaggaggtagaggctacagtgagccaagatggtgccactgcactgcaggctgggcaacagagtgagaccctgtctcaaaaaaaaaagaaagwaagataatgtgtcccccacgacctcaatatagtgagcagcaaactccctctgcaagaacttgtctgttagatgctggggcccggtaatgagcaagtcagc

SEQ ID NO: 18122 - DNA, 201 bp, Homo sapiens
gcccaggctggctcaggcgctgtctcctgggctggggccaggtctcacccctgtgcctcggaggactgaaggaggcaggcacaggaaggcaggggcagaaraaagaaaatctccttgcaccccatgcacattccatggatccagagacgtttctgggcatagttgggaattgtggcctgcgtgggaaggagtgagaggccc

SEQ ID NO: 18123 - DNA, 201 bp, Homo sapiens
ggaggaacagaggagtccagctggccttcacatggcaggtaagtgggcagagcctggggccttgggacaccagggctcatgaggggggcttcaagaaacaygggtctgtgggatgacgtttgatcatcgattgttaggattttacagctggatagtccaccatgaacacatgaactcttcgtgtggattcatgaggcccag

SEQ ID NO: 18124 - DNA, 201 bp, Homo sapiens
gcactacttttatccccacattacacataagaaaactgaggcctagaaaggttaacttatttgccaatagagaactaagtgatgaagctgaaatttgactraggcagtttgactccagagccaagatctgaggcaaccatctaaacacaggtaacccatctaaacattcatacattgagcatctactacatgccaggaacc

SEQ ID NO: 18125 - DNA, 201 bp, Homo sapiens
agaaagcctctcttccatcctcactccccatcaagagacccttatttctctgaactcctccccaaaggacagggtgctttagcacgacctcctcttcactrgatttagggcatggtgctggggagcagatgggaggacagagagacctgaatccctcaagacatcctcatcaaggaggctgtggtgggaaggaaacaagcc

SEQ ID NO: 18126 - DNA, 201 bp, Homo sapiens
ggagaaagcctctcttccatcctcactccccatcaagagacccttatttctctgaactcctccccaaaggacagggtgctttagcacgacctcctcttcaytggatttagggcatggtgctggggagcagatgggaggacagagagacctgaatccctcaagacatcctcatcaaggaggctgtggtgggaaggaaacaag

SEQ ID NO: 18127 - DNA, 201 bp, Homo sapiens
cagatcacttgaggccaggagtttgagaccaacctggccaacagagcgaaacctcgtctctactaaaaatacaaaaaattagctggacgtggtggtgcacrcctgtaatcccagctactcaggaggctgaggcaggagaatcaaactgcttgaacccaggaggcagaggttgcagtgagccaagatcacaccactgcactc

SEQ ID NO: 18128 - DNA, 201 bp, Homo sapiens
taaacttgaaattaagtaaacacaacacagtttttattttcccaaggtgagtcctttgattttttttttttaatgttaaaatattttttaaaattcaggcyaggcacggtggctcaagcctgttatcccagcactttgggcagatcacttgaggccaggagtttgagaccaacctggccaacagagcgaaacctcgtctct

SEQ ID NO: 18129 - DNA, 201 bp, Homo sapiens
tccaatccatataattaaaacaaaagtaaacttgaaattaagtaaacacaacacagtttttattttcccaaggtgagtcctttgattttttttttttaatrttaaaatattttttaaaattcaggccaggcacggtggctcaagcctgttatcccagcactttgggcagatcacttgaggccaggagtttgagaccaacct

SEQ ID NO: 18130 - DNA, 201 bp, Homo sapiens
aggctgaggcaggagaatcgcttgaacctggaaggcagaggttgcctctgtgagccaagatcatgccactgcgctccagcctgggtgacagagtgagactycgtctcaaaaaaaaaaaaaattcattctaacttacttaattttctgaaataggaaaaacattcatgtggtttaatatttgaaaggtacaaaatgggttgc

SEQ ID NO: 18131 - DNA, 201 bp, Homo sapiens
ttgccagatggctcagtcccatggcttccaaataattctgtctgtcagctgggagctcagtgggctgtgggttggaagccttggttcgtctccaggtgagmttctccgtgggccatttgggtttcttcatggcatggtggctgggttctaagagcaagcaacccaagggaaccagaaagaagctgtattaacttttataat

SEQ ID NO: 18132 - DNA, 201 bp, Homo sapiens
gcagagctcggcagggacagcttgcgtctgcatcagctggggcagattgcctgggggctgaaggacccacttgccagatggctcagtcccatggcttccarataattctgtctgtcagctgggagctcagtgggctgtgggttggaagccttggttcgtctccaggtgagcttctccgtgggccatttgggtttcttcatg

SEQ ID NO: 18133 - DNA, 201 bp, Homo sapiens
attgtgttctatggggttaatggggagcaaaatagggacaaatggggagaagttgcaagaagaaagagcttggctcagcagaaggaagggctttctaacaytgggcggtgagtgagctacctctcagaggtatggcaagctgggaccatgatcaagtatccaccaagaattcggccaagggaatttgtgcctgggcaggaa

SEQ ID NO: 18134 - DNA, 201 bp, Homo sapiens
cgtcagtctcactgtccccatgaggactaagagggacactggctaggacagaacgtatctgaaatcaccggtagttccccctgcagaatcctggaccctarccccggctattacaccacatatggcaggtcatggaggtgtgatgctgatggatgtggatgacttagatcaccaaagcagcagctccagggacagattcca

SEQ ID NO: 18135 - DNA, 201 bp, Homo sapiens
cccgtcagtctcactgtccccatgaggactaagagggacactggctaggacagaacgtatctgaaatcaccggtagttccccctgcagaatcctggacccyaaccccggctattacaccacatatggcaggtcatggaggtgtgatgctgatggatgtggatgacttagatcaccaaagcagcagctccagggacagattc

SEQ ID NO: 18136 - DNA, 201 bp, Homo sapiens
ctgtggaatagtaaatgcatggggtgtttttgttttgtttttcagaaagagtcttatttcacatagacaaggtcatgatttctggatattcttcctcatgytgcagaatacagacttgtcctatttagttgataactcaagttaaaaggacccaggacattttcaaaagacaccactaataagcacaccccttcctccact

SEQ ID NO: 18137 - DNA, 201 bp, Homo sapiens
aatttgactcccacctcatcttaatttcttggtttacttcctatatgagtttgaacaggaaaatacccactctgggccttaggtttcttcatctgagaacygaggaaaataaagcctgtctcagaatggttgcaaggaccagagagaaaggagctattagttgtgcattcccttccttcttcccagtgccattgaagaaag

SEQ ID NO: 18138 - DNA, 201 bp, Homo sapiens
gaggcatgcctttggtcttcctcttctctgctcctagcacatagtaggtgctcaataaacagagaaggatgggatgaatggatgatgggctgagagatttycatcttgaataagtagggaaagcttggaaacatctctgggggctcttggagaaattatctggtattgtggtagctccctgacctaaatttgactcccacc

SEQ ID NO: 18139 - DNA, 201 bp, Homo sapiens
catgctgttcctagtggcacccactccccagagctgggggagggcgtcagaagctgggggggtttgtgcctttaactccagctttagctctccagggtggraggagtgggttggacataaggggatgggtgcaatagtggcactcagcaatggggtatatggaggtgggggtggacatgactaatgatccatcctctaact

SEQ ID NO: 18140 - DNA, 201 bp, Homo sapiens
cctgacctcagatgatctgcctgcctcagcctcccaaagtgctgggattacaggcctgagccactgcacccagccaagatagccctactttggatggaggyaccagagaaagactctctgaggaagtgacgtttgagctgaaatgttaataattacaataaaaataatgattaaaatttaacttagttaacgtgcttccta

SEQ ID NO: 18141 - DNA, 201 bp, Homo sapiens
cctgtaatcccagctactcggaagactaaggcaggagaatcacttgaacccaggaggtgaaggttgcagtgaaccgagattgcaccactgcactccagccygggcaacggagcaagactctgtctcaaaaaaaaaaaaaaaagtggaccggtcaggtgcaaagcttgtagaaactgttttttgggatgctcaagacatttt

SEQ ID NO: 18142 - DNA, 201 bp, Homo sapiens
cttcatttcagctgtcatactataaacaaataacctttctctgttcatttaaaactagggttttttttgcatttttgtgctttttttgttggtgatttctytgtttaaaatggccgctgagcataggactgaagtgctgtctcatgttcctaggagcaggaaagctgcgacacgccttacactaaaaatatgtgttaggtg

SEQ ID NO: 18143 - DNA, 201 bp, Homo sapiens
ggaaaaaaagttaaccctaaaatgttacatactatatgtttctatttatataacattcttgaaatgacaaaaattatagaaatgaagaacagcgtagtggwtgccagtaggacagagggagtgtaggacagaagttgatgaagttgatgtggttataaaagaacacaagaggccgggcgcggtggctcacgcctgtaatcc

SEQ ID NO: 18144 - DNA, 201 bp, Homo sapiens
tttactcaaagtctaccaatttaaatgttaatctcatccaagaaaccctcatagaagtgtccagaataatgtttgatgaaatgcctgggcaccccatggabcggtcaaattgacacattataactgaccatcacagtgctgaatgaagatggccattgaatagaccttagaaagcagtggcagtctaagttggctattgct

SEQ ID NO: 18145 - DNA, 201 bp, Homo sapiens
gaaaggtgaagtcacgagttcagagtcacacagtcagtgtgcatagttgcaggacccaaatccaggcagtctggcatgagagacacactcctgaccaagaycaggaaggggcaaagccagggttcaaagccaggaacgttgaccacagtgcacatttactcagctgatgcaattgcttgactgcaggttatggaatggtca

SEQ ID NO: 18146 - DNA, 201 bp, Homo sapiens
aagaatgaagttgttataccccactggttacatgaaaaatttttaaaaaagggaaataaaaagaatgaagttggcctcctatctcacacgatacacaaaamtttctcaaaatggtttatagacttacatgtgagagctaaaactataaaacttttggaagaaaacataggagtaaatcttcatgatcttcggttagaccaa

SEQ ID NO: 18147 - DNA, 201 bp, Homo sapiens
ccttcccccggatggcccatcagctgcagagggcccactgcaggtggcctggagccaggcctcaccccatgtatatgacgctgacagcagcttccattcaygttgtctctgtgctctgagccaagtgcctttatttaggctacattaatagcttcctctgtttgctaagcacctcttctaccttagaagatttcccatttg

SEQ ID NO: 18148 - DNA, 201 bp, Homo sapiens
tctcctttcctgcaactgcttagtttattggctctctcattcctatgctgatgagcatccctattcccagaagcagcctcttcacccgtcctatgtctggytctaaaccactcctcctcccaaccttgatcacacttgcctggggaagccagcctcaaagagctgaattcaacatatcccattacaatgaatgttagtacc

SEQ ID NO: 18149 - DNA, 201 bp, Homo sapiens
tatccctatatctattttaaaatttgagtttggagtgaagttcagtagaaaactctccagccgagcctaacacaaattgctggccatagaactggttgtcrtcttgtcaccacattttcatgtggtttgttatacagcataggatattatttattgttgtattatattaattatcaccacgaaaatatttattcactctcc

SEQ ID NO: 18150 - DNA, 201 bp, Homo sapiens
caattagatagatagtattgttatttctattttacagagaaggaagctgagtccctgagatgttgagtagcttctcatagattaataagctggtaatggcraagcagacagtgaattcaggcagtctagctccagagcccatgtgcacaaccacataaaggacatttcttttctttgcctgggacatttccccaatgtctt

SEQ ID NO: 18151 - DNA, 201 bp, Homo sapiens
agtctaaaggcaggggaaagctgagtttgaaggcagtgaggcaggaggaattccctcttacacagaagaaagtcagcctattgtcccattcaggccttcarttgattggattaggcccacccacatcagggagggcaatctgctttactcaaagtctaccaatttaaatgttaatctcatccaagaaaccctcatagaagt

SEQ ID NO: 18152 - DNA, 201 bp, Homo sapiens
catctcctgtttagcatctgccagggcctgtgccgtgataccaatttatggccattggttcattgaagagcccctacttgttaggctacaaaaacaaaacrgttgtattttttcttatagctgtttccaactatatactttaaaaatctccctttcccactgtgtaacaggttccttagcaatgttatgatctgattaaca

SEQ ID NO: 18153 - DNA, 201 bp, Homo sapiens
tttcctactcatattctcatctttaacacggggaattaaaaataaggctggaattaccagagtctatggtgctctgcataatcagaaccctacctaccccmtctgctggccatatcccagagatacttaaatactttctgctccttgaacacacaaggccttttcttgtctcacttaggacctttgcacatgctgttcctt

SEQ ID NO: 18154 - DNA, 201 bp, Homo sapiens
ttaactaattcaaatgtgtttgaaaacatcatgtagaccaaatgagcatatcagcgaggtggatgtggctcgagagcctccgattttagctcagactttaytgtgggtagtcaggagccacaggagattgttgagcaggggagagacatgattaaggctgaggttctgattccccaggtgactctttgaggaagggtttcc

SEQ ID NO: 18155 - DNA, 201 bp, Homo sapiens
gaaggaaatatgagaaatatgaggctactactgacatcaaggaggcccacccaaagctgtcagttcccataaaactcttttgggattggtccctgcttggwtaaagacttgccaggagggatggagtttggcagggaggcagcacgggagctcgcaagccccctcttgacctctcctgccccagtcagcctccgggcgctg

SEQ ID NO: 18156 - DNA, 201 bp, Homo sapiens
attgagctctcatgttacgaggactctaaatgacaggggccattatcctcacaatcacgccacaggcattattcccattctgcagagcggggaactgagakgcagagaggtcaagaaggcgggccaggaacagtggtcacgcctgtaatcccagcactttgggaggccaaggcggacagattgcttgagctcaggagtttg

SEQ ID NO: 18157 - DNA, 201 bp, Homo sapiens
ctgtcaactggagcagtcttagagcagatgctgcctctcccatcccctccattgggcagtgggtgagctacctctcagaggtacggcaagctgggaccatratcacgtattcaccaagaattcggccaagggaatttgtgcctgggcaggaagttgtgagggagatggtctctgagatttgaggataatgatgataatggc

SEQ ID NO: 18158 - DNA, 201 bp, Homo sapiens
aaaatctccttgcaccccatgcacattccatggatccagagacgtttctgggcatagttgggaattgtggcctgcgtgggaaggagtgagaggcccccatyggctgcatcctcgcctgattcccaccccaagcacttgagggcaagagcagctctggctcaagtgaaaacagctatatgaccttgagcaagaaaatttgcc

SEQ ID NO: 18159 - DNA, 201 bp, Homo sapiens
gaaaatctccttgcaccccatgcacattccatggatccagagacgtttctgggcatagttgggaattgtggcctgcgtgggaaggagtgagaggcccccaytggctgcatcctcgcctgattcccaccccaagcacttgagggcaagagcagctctggctcaagtgaaaacagctatatgaccttgagcaagaaaatttgc

SEQ ID NO: 18160 - DNA, 201 bp, Homo sapiens
atggccaccaggcctctaagctcctggctggaggccactcacaaagtcagggcagatgggcctagcttctgagtcagaaccagctctcccctttttcttayctacctcctctcaagagtctagtgtccaccaaggaagtctagtggccctgaaggaggatcatggacctctgcctctttagatgcctgcagaacagagtgg

SEQ ID NO: 18161 - DNA, 201 bp, Homo sapiens
tctactacatgccaggaacctactaaactttagattcatgactctgactgttggctgtggtctcctacttgagcacataggatagaagaacatgatttctrgaagtagcttgttcagcatcttcatgccatggtggacttgggggtattctgggggggtgctgctgagcctgtgtgaggccaagtattcatgaagagcaac

SEQ ID NO: 18162 - DNA, 201 bp, Homo sapiens
atctactacatgccaggaacctactaaactttagattcatgactctgactgttggctgtggtctcctacttgagcacataggatagaagaacatgatttcyggaagtagcttgttcagcatcttcatgccatggtggacttgggggtattctgggggggtgctgctgagcctgtgtgaggccaagtattcatgaagagcaa

SEQ ID NO: 18163 - DNA, 201 bp, Homo sapiens
tgtggtccctgccctgtgcctccagctgagaagtcctcactttccatggcttctgtcccaactccaggctactgctggtcaacaagtcctttcagcgtctycattcccctcccttgaccatatgggaacttctggatccctgcctgccgtggacaggaggcttgtttcaggcctacctctcaagctcctctgtctgcaaaa

SEQ ID NO: 18164 - DNA, 201 bp, Homo sapiens
caggattgcatctagggagcctggaatgggggcttctgtgagggaggttgggacccacatgttctctgtttacagacttgtctgctttcgcctggtccttkattggtgacagttgatgtgtgtctgatcacaactggccttctggatgtggtgctggctcccagcactggaggctgtggtccctgccctgtgcctccagct

SEQ ID NO: 18165 - DNA, 201 bp, Homo sapiens
agcctgggcaacagagtgagaccctttctcaaacatcaacaagcaaacaaataaaaaactggaagttctgagtgtgtgcttgagggtgtccttgtagggtkactacacagggctgtggagctgaggaaactctcatgtcagtatctttaagtctttcctttggagctgacggaatcgtgagcactgtttcctcctggctgc

SEQ ID NO: 18166 - DNA, 201 bp, Homo sapiens
gatcacttgagcccaggaaggtcgaggtgagagtgagctgagatggcgccactgcactccagcctgggcaacagagtgagaccctttctcaaacatcaacwagcaaacaaataaaaaactggaagttctgagtgtgtgcttgagggtgtccttgtagggtgactacacagggctgtggagctgaggaaactctcatgtcag

SEQ ID NO: 18167 - DNA, 201 bp, Homo sapiens
tatcccgctcttgttttatggttgcaatattttttcacagctctgaaaacatcaagaatagtttattttcctgaatgttcttctcctcaaataggctgatycctctgagcttcttattttagtatgtttattttttttcctttctctttcatgttagaaattttctttagatgtctggcaaatcttttctgctgatattta

SEQ ID NO: 18168 - DNA, 201 bp, Homo sapiens
cttacctggcttattcctttaatgttgcaggatatcctccagttgtcagctgtcatcctgggtctcccttcagcatcaccctggaacttgtatcctaagtkggttctattgtttcatgtagcaaacatattttcttcttacctagcttactccttctttgttgcaggatatcctccaacagcttctcaagaaagggccctt

SEQ ID NO: 18169 - DNA, 201 bp, Homo sapiens
taacattggttactttactatcaggtgcttaccttattaagctttgtaaattcacagttgatccatgtagtaaaatcatgtttacttttcctttcctcagyaacattttgctttcccttccctggagttaatgattcaaagtctagcctttatattggcttagttttctatacacccactactatttcaatcccaaacatt

SEQ ID NO: 18170 - DNA, 201 bp, Homo sapiens
taaaacattttcatcaccctaaacaggcaccttatacccataaagcaactcctcctcattcctcacctccaacccagcccttggcaaccatcggctttccrtatcattttacctattctgggcatctcatataaaaggaatcagacaatatatgactttttgtctgtcttctttcacttcgtataatgttttcaaggttta

SEQ ID NO: 18171 - DNA, 201 bp, Homo sapiens
taattctacctcatggtataattctacctcattagtggagtgctgcacacactaacccagaataatactgggcaattagattacatgttttattaattgakgtgaaattcacataacataaaattaaccactttaaagtgaacaattcagtgggatttaggacaattcagtggcatttgtgcaaatggtgacttccataca

SEQ ID NO: 18172 - DNA, 201 bp, Homo sapiens
tgagccaagattgcgccattgcactccagcctgggcaacaagagcgaaactccatctcaaaaaaagaaaaaggcgcgtattactccattttttggaatggwataaattgaagagaaagaatagaattgcctaaataaatttaaaaaagtaaataaggttataattctacctcatggtataattctacctcattagtggagt

SEQ ID NO: 18173 - DNA, 201 bp, Homo sapiens
cccaggaggcgaagggtgcagtgagccaagattgcgccattgcactccagcctgggcaacaagagcgaaactccatctcaaaaaaagaaaaaggcgcgtaytactccattttttggaatggtataaattgaagagaaagaatagaattgcctaaataaatttaaaaaagtaaataaggttataattctacctcatggtata

SEQ ID NO: 18174 - DNA, 201 bp, Homo sapiens
gaggccgggcgcggtggctcacgcctgtaatcccagcactttgggaggctgaggtggacggatcatgaggtcaggagatcgagaccatcctggctaacacrgtgaaaccccatctctactaaaaatagaaaaaattagcctggtggggtggcaagcacctgtagtcccagctactagggaggctgaggcaggagaatggtg

SEQ ID NO: 18175 - DNA, 201 bp, Homo sapiens
ttaaagaaagtatttttatttttactttttattaatgacttacacacttactaggcctgcccttagcaattgccaggctggggcaggagtagaaacggagkcttatgaatttggtatgcaaatatttaaaagtcataagtcatgttaataagctgctaaaaaatatgcattgtctactccagccttgacaaatatgtatat

SEQ ID NO: 18176 - DNA, 201 bp, Homo sapiens
gctgaaaatcagcctaaggcataaatttaaggttgtatcgggtctttgctgagcctgccccttttgggagcatgtgcagtcgttttttaatttcctccatraatacagttgcttttgaatgtcctagtgtctaatatctggtccccaaaagcacaaaaacagaaaaatgaagggaaagtcagatgtcccacccctttaagt

SEQ ID NO: 18177 - DNA, 201 bp, Homo sapiens
aatctaacaatgtggtaactctggaaatccaattcccccttacccagagtttgcagtttttttgttttgtttatggcttttgattttttttcttatagacygtctctgtgctgaaaatcagcctaaggcataaatttaaggttgtatcgggtctttgctgagcctgccccttttgggagcatgtgcagtcgttttttaatt

SEQ ID NO: 18178 - DNA, 201 bp, Homo sapiens
gagtttctgattctcttttggtttttatctcctttattaatatttccattttatttatacatttgttctttattttcactacatttttctttagttctttragtatctttaagacagttattccaaagtctttgtccagtagatcaagccttttccagaaacagtttctgctaatttattttttcctttaagtgggccata

SEQ ID NO: 18179 - DNA, 201 bp, Homo sapiens
agttgcttggtttttgctgctcttaagattttctgtttttgatttttaagagtttgattttaatgtgtcttggtgtaggtctctttgagttcattctactyggagttcattgagcttcttggatgtttatattcatatcttcatcaaatttggggagttttcagcaattatttcttaaaatattttctctgcccctttctc

SEQ ID NO: 18180 - DNA, 201 bp, Homo sapiens
ttcccttgtatgtgagaagttgcttggtttttgctgctcttaagattttctgtttttgatttttaagagtttgattttaatgtgtcttggtgtaggtctcyttgagttcattctacttggagttcattgagcttcttggatgtttatattcatatcttcatcaaatttggggagttttcagcaattatttcttaaaatatt

SEQ ID NO: 18181 - DNA, 201 bp, Homo sapiens
tcttttagcctttttagtatatcagctcactgcctttgggcctctaaagtttttaatgagaaatttacttttaatcttattgagattcccttgtatgtgakaagttgcttggtttttgctgctcttaagattttctgtttttgatttttaagagtttgattttaatgtgtcttggtgtaggtctctttgagttcattctac

SEQ ID NO: 18182 - DNA, 201 bp, Homo sapiens
catctttacagttccatccccacccattcagttgtaaatgtcacaaaagtagtctcttaaatcatgtataaaacaaaaaaggaattataaaccattgttaygataatactagcttttatacttgcccatgtgtttacctttaccgagattgttatttcttcaaacagctttgagttactatatagtgtccttttatttcac

SEQ ID NO: 18183 - DNA, 201 bp, Homo sapiens
aatacacaaaaactctgcatctttacagttccatccccacccattcagttgtaaatgtcacaaaagtagtctcttaaatcatgtataaaacaaaaaaggarttataaaccattgttacgataatactagcttttatacttgcccatgtgtttacctttaccgagattgttatttcttcaaacagctttgagttactatata

SEQ ID NO: 18184 - DNA, 201 bp, Homo sapiens
cataaggcttcatgaactctcagagaggatggcctcaaggtgatctatgaatcccaaacttctgtgagttgtgaacgtcctcacaattttcacctttctckgagaactattgattctgtctttacttaactttttaatgtttttatacttttattgagatataattaacatacaatagaatataaatcttaagtgttccat

SEQ ID NO: 18185 - DNA, 201 bp, Homo sapiens
ctctttgagcaaagtcatataggattatatatctgaaattttggtgtaaattataatgtgctgaaagcactaacaagggggttgttattattacccaactvttgtcaccagcaatggcttcttcacaagcataaggcttcatgaactctcagagaggatggcctcaaggtgatctatgaatcccaaacttctgtgagttgt

SEQ ID NO: 18186 - DNA, 201 bp, Homo sapiens
catgtgtttttggtgcttgagggatatcctggtggagtttctccagtagacattggttattgttttctggaactcagaagataagagatatgaaacacatyaaactacaggtgatattcaaagtcatgggcatggatgagatcactcaaaataaatgcttagagcagaaaaagaatttaagaatcactgtcttttaaccat

SEQ ID NO: 18187 - DNA, 201 bp, Homo sapiens
ccatggtgattagatgtgggagttgaggggcaggaggagtagaagaggaccacaggcttccagctggagttggaagacaggaactgacaccatcaaagcargttaagggaagacaaaaagacagcttgggacatgtgtttttggtgcttgagggatatcctggtggagtttctccagtagacattggttattgttttctgg

SEQ ID NO: 18188 - DNA, 201 bp, Homo sapiens
cacctctgaaagccatctggactcagggaaaagttgacttcatacaatattttaaattctttatgtatgagaaaaataagataaacaggccatggtgattrgatgtgggagttgaggggcaggaggagtagaagaggaccacaggcttccagctggagttggaagacaggaactgacaccatcaaagcaggttaagggaag

SEQ ID NO: 18189 - DNA, 201 bp, Homo sapiens
ttttgctcctcacctctgaaagccatctggactcagggaaaagttgacttcatacaatattttaaattctttatgtatgagaaaaataagataaacaggcyatggtgattagatgtgggagttgaggggcaggaggagtagaagaggaccacaggcttccagctggagttggaagacaggaactgacaccatcaaagcagg

SEQ ID NO: 18190 - DNA, 201 bp, Homo sapiens
ggacagttctaggatgtattccatacagcttctcagacagtccccagtaagactgagccccagttacccacagtgaactactcattcacaaacacttgacygacattcctcccttcccagtatcactcctaatgctccttcacttctgcttctttgactcacctcccaaatcgactatatgtacccatgattatcttaggg

SEQ ID NO: 18191 - DNA, 201 bp, Homo sapiens
ggtatcagccctacagttctagagggacagttctaggatgtattccatacagcttctcagacagtccccagtaagactgagccccagttacccacagtgawctactcattcacaaacacttgactgacattcctcccttcccagtatcactcctaatgctccttcacttctgcttctttgactcacctcccaaatcgacta

SEQ ID NO: 18192 - DNA, 201 bp, Homo sapiens
ctattttatcattaattacattaaatgtaaatggcagctcagagagggtcctgtcaggggtacatgcatcttaacagagatttcatgtgaatagaatgagwgcttgagattttaatgctggaatttcagtatctgccagggaattggggatatacagtcatatatgtcaagtaggggcacacagagtgaagctactaatta

SEQ ID NO: 18193 - DNA, 201 bp, Homo sapiens
taaatcttcacatatatagccaaatgattttttgcaagggtgcccaaaccattctgtagggggaaaagacagtcttttcaacaattggtgctgagaaaackatatccaaatgcaaaagaatgaagttggactcttacctaataacatatacaaaacaaattcaaaatggaccaaagaactaaatctaagagctaaaactat

SEQ ID NO: 18194 - DNA, 201 bp, Homo sapiens
atgttcaaagaactaagagaaagcatgtctaaacaattaaaggaaagtataggggtgatgtctaaccaaatagaggatattaataaagagatacaaattayaaacaagaaccaaatggaaatcccagcattgaaaagcacagtgacttttcataaaataagtaaaatgaaattttgactagagaggctcaacaacagattt

SEQ ID NO: 18195 - DNA, 201 bp, Homo sapiens
aaaaccagccatatgttaaaatttgttgaacctgtcttgatgggtacatgggactttattatcctattctctctatttgtgtatgtatttgaaattttccktaacagaaaatacatacatacatacaatgcatattctggagatggaaattcaggaataaggacctctgtaaaagcaatgaaaatgctgacaaaaattgtc

SEQ ID NO: 18196 - DNA, 201 bp, Homo sapiens
caggcattggctaaagcatcatctctgtcaaagtggttccttactgccgccccacagcaccaggatttgagagtacaattcattctgactggaggtaattragaggacttttgaaagaggtgagatttggatttctctttagtcagaagtggtctaatcagggctgagtctgtgacatcagggagatgcctacattgaggg

SEQ ID NO: 18197 - DNA, 201 bp, Homo sapiens
gaggaggttgttgtaaccacccaggtaagagatgagggtggcgtggtccagtttggtagcgatgggtaggtgggaagtggagaaggcagagcccacaagaygtgatgagggactggctatgggctgtgagggaaggaagcatgcaactaacaccagtgcttttccacctgagcaattcagggactccaggtgtcacagggc

SEQ ID NO: 18198 - DNA, 201 bp, Homo sapiens
aaaaccctctggctgctgcggggagtccatggaggaggttgttgtaaccacccaggtaagagatgagggtggcgtggtccagtttggtagcgatgggtagstgggaagtggagaaggcagagcccacaagacgtgatgagggactggctatgggctgtgagggaaggaagcatgcaactaacaccagtgcttttccacctg

SEQ ID NO: 18199 - DNA, 201 bp, Homo sapiens
agattgggccattgcactctaacctgggtaatagagccagaccctgtctcaaaaaaaaaaaaaaaaaaaaaaaaaaggttgacaacttagataaaatgaayaaattccttgaaagacacaaactatcaaaacccattgaggaagaaatagatatccaaagtatccctatatctattttaaaatttgagtttggagtgaagt

SEQ ID NO: 18200 - DNA, 201 bp, Homo sapiens
ctcaccttccaccttaggcagccaaaaagtgaagaaattaaaccaggccgggcgcggcggctcacgcctgtaatcccagcactttgaaaggccaaggcccrtggattacctgaggtcgggagatcgagaccagcctgagcaacatggagaaaccccgtctctattaaaactaaaaaattagctgggcgtggtggcaggcac

SEQ ID NO: 18201 - DNA, 201 bp, Homo sapiens
tttatagcactaaaatgtctatattagaaacgaaaaaaatcaatgaactcaccttccaccttaggcagccaaaaagtgaagaaattaaaccaggccgggcrcggcggctcacgcctgtaatcccagcactttgaaaggccaaggcccgtggattacctgaggtcgggagatcgagaccagcctgagcaacatggagaaacc

SEQ ID NO: 18202 - DNA, 201 bp, Homo sapiens
aacgtggtgaaaccccgtctctacaaaaatacaaaaattagcaggcatgatggcaggtgctcgtaatcccagctggggaggctgaggcaggagaatcgctygaaccctagaggcagaggttacagtgagcagagattgcgccactacactccagcctaggtgacagagcaagactccgtctcaaaaaaaaaagaaagaaaa

SEQ ID NO: 18203 - DNA, 201 bp, Homo sapiens
ggccaaggtggacaaatcacctggggcaaggagttcgagaccagcctggccaacgtggtgaaaccccgtctctacaaaaatacaaaaattagcaggcatgrtggcaggtgctcgtaatcccagctggggaggctgaggcaggagaatcgcttgaaccctagaggcagaggttacagtgagcagagattgcgccactacact

SEQ ID NO: 18204 - DNA, 201 bp, Homo sapiens
gatgggttttcaccatgttggccaggctggtctcaaactcatgacctcaagtgatccgcccccctcagcctctcaaagtgctgggattacaggcgtgagcyactgcgcccggccagcacttaacatttcttgagtacccagaggcaggaagtgggagtggtgattgggaatgaggaaaagatgttcgttattattacttcc

SEQ ID NO: 18205 - DNA, 201 bp, Homo sapiens
ggatgaggttccagaatcctgtctcactagaccaggtcaagtgacacagcccagcctagaaatttgcccctctttactcccccttctctccagaactgtcrtcaaccaagatgccaacagggaatgggttgagctcctcagctgtgtgaacccagggaggttatgcttaggggagactgaggcctttttaatctccagaca

SEQ ID NO: 18206 - DNA, 201 bp, Homo sapiens
cctggctagtgtttgtttgtttgtttgtttgtttttctttttttcttttagtagagacagggtttcaccacattggccaggctggtctcaaactcctgacytcagatgatctgcctgcctcagcctcccaaagtgctgggattacaggcctgagccactgcacccagccaagatagccctactttggatggaggtaccaga

SEQ ID NO: 18207 - DNA, 201 bp, Homo sapiens
tatttatgttttttatttatttattttagacagaatcttcctctattgcccaggctggagtgcagtggtgcaatcttacttcactgcaacctccacctccygggttcaagcaattctcctgcctcagcctcccgaatagctaggggtacaggcacacaccaccacacctggctagtgtttgtttgtttgtttgtttgtttt

SEQ ID NO: 18208 - DNA, 201 bp, Homo sapiens
ttccagtacaacgctcttgcccttggtgccttcgagtagcattttaatgggacaaaagtggcctccctggttattccagccccagtggaaagcagaagccrccccaacagccaatgagaaagccctgcttgtgagtgggagaggtagagaaattgacagaagacagcttagaagtccaagggagagtgtgagtgggaatgt

SEQ ID NO: 18209 - DNA, 201 bp, Homo sapiens
gcgatctcagctcacctcaacctctgcctcccgggttcaagcgattctcccgcctcagcctcctgagtagctgggattacaagcgtgtgccaccacgcccrgctaatttttgcatttttagtagagatgggatttcaccatgttggtcaggtgcgtctcaaactcctgacctcaagcgatcctcctgcctcagccttccaa

SEQ ID NO: 18210 - DNA, 201 bp, Homo sapiens
gtggcgcgatctcagctcacctcaacctctgcctcccgggttcaagcgattctcccgcctcagcctcctgagtagctgggattacaagcgtgtgccaccaygcccggctaatttttgcatttttagtagagatgggatttcaccatgttggtcaggtgcgtctcaaactcctgacctcaagcgatcctcctgcctcagcct

SEQ ID NO: 18211 - DNA, 201 bp, Homo sapiens
ttatttcctaatctcttttttttttttttttttgagacagagtcttgctctgccgcccaggctggagtgcagtggcgcgatctcagctcacctcaacctcygcctcccgggttcaagcgattctcccgcctcagcctcctgagtagctgggattacaagcgtgtgccaccacgcccggctaatttttgcatttttagtaga

SEQ ID NO: 18212 - DNA, 201 bp, Homo sapiens
ggaccttgtaagccctcacttcccggacatcaagggctttgtgatcgtccatgtggccactgccaagtgatggatcatgagggactgagaggggtggattyggcccctgtcctcctcctgcccattctttgtctcttccacatgggagccaggaggcctcagttaatcctgcctcaacctctgccctactttgtaaactta

SEQ ID NO: 18213 - DNA, 201 bp, Homo sapiens
gccacaaggtgaacttgatcctgaggagcctggggagccgtggattggcaggccagactcagaatggcaagaggactgacagtctgcctttctcccctccytttcctccagcgtgcctaccctggagcctcaggagagggcctcagtccagtttgacatcaccccctccaaaagtggcccaaggcagctgcaggtggacct

SEQ ID NO: 18214 - DNA, 201 bp, Homo sapiens
ctgacctcagatgatccacctgcctcagcctcccagtgtgctgggattacaggagtgagccaccgcacctggcctgcaaacatgttgataaggcttgaatrtcaagccacaaggtgaacttgatcctgaggagcctggggagccgtggattggcaggccagactcagaatggcaagaggactgacagtctgcctttctccc

SEQ ID NO: 18215 - DNA, 201 bp, Homo sapiens
ctcccaagtagctgggattataggcacaacaccacgccctgctaattttgtaattttttttagtagagacagggtttcaacatgttggtcaggctggtctygaactcctgacctcaggtgatccacccgccttcacctcccaaagtgctgggattacaggcgtgagccacggcacccggcctataattattatttattact

SEQ ID NO: 18216 - DNA, 201 bp, Homo sapiens
gagtctctctctgtcgctcaggctggagtgcagtggcgcaatctcagctcactgcaacctccgcctgctaggttcaagtaattctcctgcctcagcctccyaagtagctgggattataggcacaacaccacgccctgctaattttgtaattttttttagtagagacagggtttcaacatgttggtcaggctggtcttgaac

SEQ ID NO: 18217 - DNA, 201 bp, Homo sapiens
taaaacttagcttttataattataattattattgttattttgagatagagtctctctctgtcgctcaggctggagtgcagtggcgcaatctcagctcactrcaacctccgcctgctaggttcaagtaattctcctgcctcagcctcccaagtagctgggattataggcacaacaccacgccctgctaattttgtaattttt

SEQ ID NO: 18218 - DNA, 201 bp, Homo sapiens
gtcccaggaccacacttggagaaccgtggtctatcaccatgcaaggagtaaatgatataatgtatataaagtatttggcatcattcttactacctaatgarcattcaatttatgtttattatcagtgtttttgatattattatcaataataatatattatcaataacataataaatcaatcaataaaataaaaataataat

SEQ ID NO: 18219 - DNA, 201 bp, Homo sapiens
tcataatattcctttactctctgtttttttcctaactccccaaacttgttacctttactatccttttaatgtccatggaatctgtagagatgtcctctctkgcatttatcatattagtaacttgtgccttctctcttttttttctgagttagccttgctagaggcttattgactttactgatcttttcaaagaaccagctt

SEQ ID NO: 18220 - DNA, 201 bp, Homo sapiens
ccagtgaacccatctgggattaatgtgttctggtttggaaggttattaagtactgattccattttttagtagatataggcctattcatgttgtctgtttcktcttatgtgaattttagcagatttttttctttcaagaactggtcccttttatctggattatcaaacctgtgggcataaagttgttcataatattccttta

SEQ ID NO: 18221 - DNA, 201 bp, Homo sapiens
atttttttttcttaaattcttggtataattcaccagtgaacccatctgggattaatgtgttctggtttggaaggttattaagtactgattccattttttartagatataggcctattcatgttgtctgtttcttcttatgtgaattttagcagatttttttctttcaagaactggtcccttttatctggattatcaaacct

SEQ ID NO: 18222 - DNA, 201 bp, Homo sapiens
tttaattttaatttccaattgttcattgctggtatataggaaaatgattgacttctgtatattagtaatcttataccctgtaaccttgctattaccactcrtaagttccaggattttttgtttgttgttgttgacaattcttttggattttctacataaacaattatatcatttgtgaacaaagactgttttatttcttcc

SEQ ID NO: 18223 - DNA, 201 bp, Homo sapiens
attgtacaattgtactgactactctgggtcttttgcctcttgacataaacttttttatgtcatggctctttaaaaaaatcttaattgatatatattagtartacatattttgtgggtacacatattttgatacatgtatagaatgtgtaacaatcgaatcagggtaattgggatatccatcaccttatacatttatctgta

SEQ ID NO: 18224 - DNA, 201 bp, Homo sapiens
aataccacactgtcttgatgactgtacctttatagtaaatcttaaaggtacctgaagtcaggtagtgccagtcctctaactttgttcctctccttcaatawtgtacaattgtacaattgtactgactactctgggtcttttgcctcttgacataaacttttttatgtcatggctctttaaaaaaatcttaattgatatata

SEQ ID NO: 18225 - DNA, 201 bp, Homo sapiens
gtctttgtccattctttcactaataccacactgtcttgatgactgtacctttatagtaaatcttaaaggtacctgaagtcaggtagtgccagtcctctaaytttgttcctctccttcaataatgtacaattgtacaattgtactgactactctgggtcttttgcctcttgacataaacttttttatgtcatggctctttaa

SEQ ID NO: 18226 - DNA, 201 bp, Homo sapiens
gcatgctcccatagtcctagctacctggaggctgaggcaggaggattgcttgagcccaagagctggaagtttgcagtgagctatgatcacaccactgcacytacagcctgggtgacagagcaagaccttgtcttaaagaaaaaaaaaaaaagatcactgatcatagaagcaaacacatgctcttggaaaaatggctcttat

SEQ ID NO: 18227 - DNA, 201 bp, Homo sapiens
tgtaactctcattaacttgaacacctagaggccattgtaggtttattaattggcctaatttcaatattattgtgtatccgggaataggaaggcccaaggamagggagagagatagggaaatggccagtcggtggagcagtcagaactcacatgacattttttaattaagttcaacatcttacagggcatggtttgtggtgc

SEQ ID NO: 18228 - DNA, 201 bp, Homo sapiens
atcttatatggagatcactaaaactttctccatattagcaataaggctattttgctttcttatcattcctatgtcacttttagtttccttcaagagtagcrcttttaatttccttcaagaactttccctttgcattcaaaaccttgctgtttggcacaagaggcctagcttttggcccatcttggctttctatgtgccttc

SEQ ID NO: 18229 - DNA, 201 bp, Homo sapiens
gagaatcagggccttgctctggattaggctttggcttaatggaatgttatggctggtgtgatcttatatggagatcactaaaactttctccatattagcartaaggctattttgctttcttatcattcctatgtcacttttagtttccttcaagagtagcacttttaatttccttcaagaactttccctttgcattcaaaa

SEQ ID NO: 18230 - DNA, 201 bp, Homo sapiens
caactaagtttatgtaatattcaaaatcttttgttgccatttcaacaacgtttagagcatcttcaccaggagtagtttccatctttgaaaaacactttctktgctcacacataagaagcaactcttcatctgttcaagttttaccatcagatggagcaattcagtcacatctttaggctgcactctaattctcttgctgtt

SEQ ID NO: 18231 - DNA, 201 bp, Homo sapiens
ataaaggaagaaaacaaaaaaaattagccaggcatggtggtacacacctgttgtctcagctactcaaaagtgaggtgggaggatcacttgagcccgggagktcaaggctgcagtgagctgagatcctgccactgcactccagcctgggtaacaaagggagactctttctcaaaaaaaaaaaaaaaaagttaaccatctgaa

SEQ ID NO: 18232 - DNA, 201 bp, Homo sapiens
tttttccccgtgtggatatccagttgcttcagcaccatttgttgactatcttttctccattgtatttcctttgctactttgtcaaagatcaactgactatrtttgtgcaggtctatttctgaactctcttctattccattgatctagaggcatacctcagacatattgcaggtttggttccagacaaccacaatagtagga

SEQ ID NO: 18233 - DNA, 201 bp, Homo sapiens; identical to SEQ ID NO: 2580

SEQ ID NO: 18234 - DNA, 201 bp, Homo sapiens
gtactccaccctgggtgacagagtgagattctgtctcaaaaataaacagacaagacaaaaattacaacagatatacagtaacccagacagtgtgatactgrcatgagaatggacatatagatcaaagaaactgaactgagagttgaaaaataaacccttaaaattatgatcaattgattctacaagcgtgtcaagacaatt

SEQ ID NO: 18235 - DNA, 201 bp, Homo sapiens
tccattaaaaagctattagaaatgataaacaagttcagcaagtttgcagaacacaagatcaatatacaaaaattaatcagatttctagatactggcaatgrataatccaaaaatgaaattaagaaaataaatccatttacaatagcatcaaaaagaataaagtacttaggaataaattcaacaaaagaagagcaagactta

SEQ ID NO: 18236 - DNA, 201 bp, Homo sapiens
aaaagaaagaaaataccaacaaatgctggaacacagaagaaacttgaggacattatgctaagtgaaataagccagacataaaagaacaaatattctatgakgccgcttatatctatgaagtacctagagtagccaaactcatacagacagaaagtagaatggtggttgtcaggggctaagatctggggagaatgggcatta

SEQ ID NO: 18237 - DNA, 201 bp, Homo sapiens
ctgggtcccttcagctgggagcttctggaacttagaacgtggggtctagcctgggcaacatggcaaaaccccatctctataaaaaatacaaaagaattagycaggcatggtggcatatgcctgtagtcccagctactcaggaggctccagtgggaggaatgcttgattctggaaagcagaggttgcagtgagacaagattg

SEQ ID NO: 18238 - DNA, 201 bp, Homo sapiens; identical to SEQ ID NO: 2577

SEQ ID NO: 18239 - DNA, 201 bp, Homo sapiens
gtacgctcaattgggtggggtaagttccagacccctgcttttccttacccatgctgctcatgcccacccctcctgcccaggtgtgttccggtgcggcccarcctcagtcaccgccatccgcgagggtgatgtgcacctggctcacgatggccccttcgtgtttgcggaggtcaacgccgactacatcacctggctgtggca

SEQ ID NO: 18240 - DNA, 201 bp, Homo sapiens
gcacagcctctctggggagcagtttgaggaggacatcctgaacatctgcctctccatcctggatcgaagccccggtcaccaaaacaacccagccaccgacrtgtcctgccgccacaaccccatctacgtcaccagggtcatcagtgccatggtgagaagcccctccatccctgcacatgtacttcctcaaggatcccccag

SEQ ID NO: 18241 - DNA, 201 bp, Homo sapiens
gaggcctcagttaatcctgcctcaacctctgccctactttgtaaacttaggcaagttccttctcctcctgggcctcagtttactcttctgtaaaatgaagkgttgcactcagtaatccttaaacttttggacaaccatagatgatgtaagaaccgagggagcctctccaaccttcatctctcatccccatggctgggaggt

SEQ ID NO: 18242 - DNA, 201 bp, Homo sapiens
tggagcctcaggagagggcctcagtccagtttgacatcaccccctccaaaagtggcccaaggcagctgcaggtggaccttgtaagccctcacttcccggayatcaagggctttgtgatcgtccatgtggccactgccaagtgatggatcatgagggactgagaggggtggatttggcccctgtcctcctcctgcccattct

SEQ ID NO: 18243 - DNA, 201 bp, Homo sapiens
tcaagggcaggtacaagccagtcaagtacggccagtgctgggtcttcgccggagtcctgtgcacaggtaccctgggagagaagggccccagggtacctgtrcccccagcttcctctatctaaatgtatttacatatatttgcatatgctgcaacccatcttcattgatggattcattgacagggagaacgaagtctggctg

SEQ ID NO: 18244 - DNA, 201 bp, Homo sapiens
accgaggtgtggtgcaaggacagtggcagggcaagtacggcggcggcaccagcccgctgcactggcgcggcagcgtggccattctgcagaagtggctcaarggcaggtacaagccagtcaagtacggccagtgctgggtcttcgccggagtcctgtgcacaggtaccctgggagagaagggccccagggtacctgtgcccc

SEQ ID NO: 18245 - DNA, 201 bp, Homo sapiens
ttattggcttcttttgcattcgtgggtcactttgcatatccagccctttcacagaacaatcgggggtcactttacctatacggtcctttcatggaacactwccccacagcattcacaaaaataaattccaggtggatggcaaatctaactgtgaagggtaagacaataaagataacataaaaaaaaaaaaaactactacct

SEQ ID NO: 18246 - DNA, 201 bp, Homo sapiens
ggtgggcggatcacctgaggataggagttccagaccagcctgaccaacatggagaaatcccatctccactaaaaatacaaaattagccgggagtggtggcrcatgcctgtaatcccagctactcgggaggctgaggcaggagaatcacttgaacccgggaggtggaggttgtggtgagccgagatcacaccattgcactcc

SEQ ID NO: 18247 - DNA, 201 bp, Homo sapiens
atttactcaaatcatataactcattcactcagtcattcactcatatcattcattcatactttcatttatttatccatttattcactcactttcattcattkgctctctttcactcattcattcatgcattcttcaatttgcttactctttattcactcatttgttcattttttcattcacttattcctacatttatgcttc

SEQ ID NO: 18248 - DNA, 201 bp, Homo sapiens
ccatctctactaagaatacaaaaattagctgggcatggtggcatgtgcctgtagtcccagctactcaagaggctgaggcaggagaattgcttgaacccagraggtggaggttgcagtgagccgagatcatgccactgcactccagcctcgcgacagagcgagactccgtctccaaaaaaaaaaaaagactgaggtttatgg

SEQ ID NO: 18249 - DNA, 201 bp, Homo sapiens
atcattcttactacctaatgagcattcaatttatgtttattatcagtgtttttgatattattatcaataataatatattatcaataacataataaatcaawcaataaaataaaaataataatacccgctcatggaattgttgtaaggattaaataagtcaatctgtgaaagcgcttccaagtgcagtacactttaatccct

SEQ ID NO: 18250 - DNA, 201 bp, Homo sapiens
taaagaaaaaaaaaaaaagatcactgatcatagaagcaaacacatgctcttggaaaaatggctcttatagagttgcctgactcagggttgccacaaaacttcaatttgtaaaaaatgcaatatctgcaaagtacaataaaatgaagcacagtaaaataaggtatgcctgtctttgtccattctttcactaataccacactg

SEQ ID NO: 18251 - DNA, 201 bp, Homo sapiens
ttaaagaaaaaaaaaaaaagatcactgatcatagaagcaaacacatgctcttggaaaaatggctcttatagagttgcctgactcagggttgccacaaaacttcaatttgtaaaaaatgcaatatctgcaaagtacaataaaatgaagcacagtaaaataaggtatgcctgtctttgtccattctttcactaataccacact

SEQ ID NO: 18252 - DNA, 201 bp, Homo sapiens
gcttcagcttgcacttttatgttatagagatggcgtctttccttaaaccttatgaaccaacctgtgctagcttcaaacttgtcttctgtagcttcctaacrtctctcaatccttatagaattgaagagaatcagggccttgctctggattaggctttggcttaatggaatgttatggctggtgtgatcttatatggagatc

SEQ ID NO: 18253 - DNA, 201 bp, Homo sapiens
aacctctttcaaacttggagtcaatcctctcaaaccctgccactgctttatcaactaagtttatgtaatattcaaaatcttttgttgccatttcaacaacrtttagagcatcttcaccaggagtagtttccatctttgaaaaacactttctttgctcacacataagaagcaactcttcatctgttcaagttttaccatcag

SEQ ID NO: 18254 - DNA, 201 bp, Homo sapiens
gagtttgagaccagcctggtcaacatggtgaaacctcatctctactaaaaacacaaaaagtagctgggcgtggtggtgggtgcctgtaatcccagctactygggaggctgaggcaggagaatcgcttgaacccgggaggcggaggttgcagtgagccaaaatcacaccagtgcactccagcctgggcgatagagcaagact

SEQ ID NO: 18255 - DNA, 201 bp, Homo sapiens
gatcaggagtttgagaccagcctggtcaacatggtgaaacctcatctctactaaaaacacaaaaagtagctgggcgtggtggtgggtgcctgtaatcccarctactcgggaggctgaggcaggagaatcgcttgaacccgggaggcggaggttgcagtgagccaaaatcacaccagtgcactccagcctgggcgatagagc

SEQ ID NO: 18256 - DNA, 201 bp, Homo sapiens
accaagaaaggtgaagtcacgagttcagagtcacacagtcagtgtgcatagttgcaggacccaaatccaggcagtctggcatgagagacacactcctgacyaagaccaggaaggggcaaagccagggttcaaagccaggaacgttgaccacagtgcacatttactcagctgatgcaattgcttgactgcaggttatggaat

SEQ ID NO: 18257 - DNA, 201 bp, Homo sapiens
atgatgttgcccaggctggactcgagtgatctgcccgccttggcctcccaaagtgctgggatgacaggcttaagccacggcaccaggccagagatgtttaytaagtgcttaaatgtgccaagtcctgtcccaagaattctgcatgcgacggcacaatccctccagccaccttgtgtgtggtactagtgctagctccatctt

SEQ ID NO: 18258 - DNA, 201 bp, Homo sapiens
gaggcttttgacccagctctcagagaagctggaaatttgcatttttatgtgaaatttcctggcaactgatttaaaactttatttacatagagaatcaaacrcaaggcatgtggcgccggtgtgcatatggctcttgaactgccagtttgacttccatgagccatagtaaattaaaggagcaagggggtgcctgccgctgac

SEQ ID NO: 18259 - DNA, 201 bp, Homo sapiens
aattatgttcaattgatttctacatgggtgtcaagacaattcaatggagaaagaataaaaatagtcttttcaataaatggtgttgggaccgctgtatacccacatgcaaaagaatgaagttgttataccctacagttctgtaatcatatttatactcagttttaattacatgcaaattaaagggcagattatgcagaaatt

SEQ ID NO: 18260 - DNA, 201 bp, Homo sapiens
tgtccccactttacagataggaaaactaaagcttgccgggacagattaatgaaaacagtaataaaagttcacacactgacctcatggtgaggcagtttgtwtggtggtttgatgggggaagagaggtgagagaagaggacagattccagagcctaaggaggatgctcagcaggacctggtgagggctctgttgtgagtgat

SEQ ID NO: 18261 - DNA, 201 bp, Homo sapiens
ataagaatagtcttttcaacaaatggtgttgggaccactgtacatccccacatgcaaaagaatgaagttgttataccccactggttacatgaaaaattttwaaaaaagggaaataaaaagaatgaagttggcctcctatctcacacgatacacaaaaatttctcaaaatggtttatagacttacatgtgagagctaaaact

SEQ ID NO: 18262 - DNA, 201 bp, Homo sapiens
acacaacaatatgaatgtacttaatgacactgaagtatacacttaaaaatggttaagatggtaaattttatgttatgtattttatcacaatttttaaaatagaaagaagacaaaagaagagagggaggaagacagggagggagaaatggaaacagagaaatttccaaattggaaagaaatttgcacatgacataattttgt

SEQ ID NO: 18263 - DNA, 201 bp, Homo sapiens
agctctgggtagatggtagtgatggttacacaacaatatgaatgtacttaatgacactgaagtatacacttaaaaatggttaagatggtaaattttatgttatgtattttatcacaatttttaaaatagaaagaagacaaaagaagagagggaggaagacagggagggagaaatggaaacagagaaatttccaaattggaa

SEQ ID NO: 18264 - DNA, 201 bp, Homo sapiens
gagctctgggtagatggtagtgatggttacacaacaatatgaatgtacttaatgacactgaagtatacacttaaaaatggttaagatggtaaattttatgttatgtattttatcacaatttttaaaatagaaagaagacaaaagaagagagggaggaagacagggagggagaaatggaaacagagaaatttccaaattgga

SEQ ID NO: 18265 - DNA, 201 bp, Homo sapiens
agagctctgggtagatggtagtgatggttacacaacaatatgaatgtacttaatgacactgaagtatacacttaaaaatggttaagatggtaaattttatgttatgtattttatcacaatttttaaaatagaaagaagacaaaagaagagagggaggaagacagggagggagaaatggaaacagagaaatttccaaattgg

SEQ ID NO: 18266 - DNA, 201 bp, Homo sapiens
acaccgtatcaatagaaaaaaggacaaaataacatgatcatctcaatagatgcagaaaaagcatttgacaaaatctcatacccctttatgataaaaaaaaacactcaacaaattaagaatagaagtaaacttcctcagtctgataagtcacctataaaaaagctacagctaaaatgatacttaatagtgaaacgttgaaca

SEQ ID NO: 18267 - DNA, 201 bp, Homo sapiens
tcagcaacatataaaaaagattatatgccatgagcaagtgggatttatcccaagaatacaagatgggtttaacattgaaaatcagctaatataatacaccrtatcaatagaaaaaaggacaaaataacatgatcatctcaatagatgcagaaaaagcatttgacaaaatctcatacccctttatgataaaaaaaaacactc

SEQ ID NO: 18268 - DNA, 201 bp, Homo sapiens
agttctgtgaacccctctagcaaattatgaaacctaaggctggggccagttatgagaaccccaaatctgtagcaaagttggacagaagtgtgagtaacccygagtaaccaacacttgtgactggagtctgaagtctcagtcttgtgggactgagcccttcaacgtgtggagtctgatgctaactccaggtagctactgtta

SEQ ID NO: 18269 - DNA, 201 bp, Homo sapiens
cattgaggtgctgagagggtggcatgcttagagaggagatggaaaccccacaccacccctgccccctgccataccttgccctgtgtatctctcccacttgrctcttccagagttatatccttcataacaaaccaggaatggtaagtaaactgtttttctgagttctgtgaacccctctagcaaattatgaaacctaaggct

SEQ ID NO: 18270 - DNA, 201 bp, Homo sapiens
aggttggggaagacattgaggtgctgagagggtggcatgcttagagaggagatggaaaccccacaccacccctgccccctgccataccttgccctgtgtawctctcccacttggctcttccagagttatatccttcataacaaaccaggaatggtaagtaaactgtttttctgagttctgtgaacccctctagcaaattat

SEQ ID NO: 18271 - DNA, 201 bp, Homo sapiens
cctgaaaaatcaaggcatgattagggattggggactttaaaccccatctctgacctccagggaggggagagaggctgaagattgagtttatcacctaaggyctatgatttaatcagtcatgcctatgtaatgaaactctgtaaaaactgctaaacaatggggtttggagaggttccaggttggggaagacattgaggtgct

SEQ ID NO: 18272 - DNA, 201 bp, Homo sapiens
ctgaggtcaggagttcgagaccagcctggccaacattgggaaaccctgtctctactaaaaatacaaaaattaattgggtgtgggggcatgcacctatagtyccagctactcgggaggctgaggcaagagaatcacctgaacctgggaggcggaggttgcagtgagccgagatcaggccactgcactccagcctggatcaca

SEQ ID NO: 18273 - DNA, 201 bp, Homo sapiens
taaaatcattttatgagccaggcatggtggctcacgcctgcaatcccagcactttgggaggccaaggtgggcagatcatctgaggtcaggagttcaagacyagcctggccaacatggcgaaaccccatttctactaaaaatacaaaaattagctgggcgtggtggtggttgcctgtagtcccagctgttcaggaggctgaa

SEQ ID NO: 18274 - DNA, 201 bp, Homo sapiens
tatctagaacttgctaagcaaaatggtaagcaatgtccaagcattatttcatttaatatttattttaaaatcattttatgagccaggcatggtggctcacrcctgcaatcccagcactttgggaggccaaggtgggcagatcatctgaggtcaggagttcaagactagcctggccaacatggcgaaaccccatttctacta

SEQ ID NO: 18275 - DNA, 201 bp, Homo sapiens
aaaaaaaaaaaaaaaaaaaaaaaaaaaaaaaccatggccacaggagaaattaacatcctgttacatgataacagtgatgacaatcactgttactgagcgcyggctgtgggctggccattttcacatgttatgtagtcattttatttaacaaatgtttacaaagcccttaccatgagcttttaagtgagacactagtacaaa

SEQ ID NO: 18276 - DNA, 201 bp, Homo sapiens
tcctaagatttaactatgaccagctgggtgcggtggctcacacctataatcccagcactctgggaggccgaggcaggcagatcacctgaggtcaagagttygagaccagcctggccaacatggcgaaaacccgtctctactaaaaatacaaaattagccaggcatggtggcccatgcctgtaatcccagctacttgggagg

SEQ ID NO: 18277 - DNA, 201 bp, Homo sapiens
gcttgattctggaaagcagaggttgcagtgagacaagattgtgccactgcactccagcctgggcaacacagtgagaccctgtctcaaaaaaaaaaaaaaaagtacatgaggtctgtgggtcttttgtcctaagatttaactatgaccagctgggtgcggtggctcacacctataatcccagcactctgggaggccgaggca

SEQ ID NO: 18278 - DNA, 201 bp, Homo sapiens
tctagcatcatattttacagctctggttgcacttttttttttttctttgagacagaatctcactcttgttgcccagactggagcgcaataatgtgatctcrgctcactgcaacctccgcctcctgggttcaagcaattctcctgcctcaccctcccaagtagctgggattacaggtgcccgccaccatgcccagctaattt

SEQ ID NO: 18279 - DNA, 201 bp, Homo sapiens
gggcctgtgccgtgataccaatttatggccattggttcattgaagagcccctacttgttaggctacaaaaacaaaacagttgtattttttcttatagctgyttccaactatatactttaaaaatctccctttcccactgtgtaacaggttccttagcaatgttatgatctgattaacatattttcaaccatttctgcttgt

SEQ ID NO: 18280 - DNA, 201 bp, Homo sapiens
cgcctgtagtcccagctactctggaggctgaggcaggagaatcgcttgaacctggaaggcagaggttgcctctgtgagccaagatcatgccactgcgctcyagcctgggtgacagagtgagacttcgtctcaaaaaaaaaaaaaattcattctaacttacttaattttctgaaataggaaaaacattcatgtggtttaata

SEQ ID NO: 18281 - DNA, 201 bp, Homo sapiens
taaaacaaaattcttcacataaagctttaaaaaattcattccaggccaggcacggtggctcacacctgtaatcccagctactcaggaggctaaggcaggakaattgcttgaacccaggaggcagaggttgcagcgagctgagatcacaccattacactccaccctggtcaacatagtgaaaccccatccctactaaaaaca

SEQ ID NO: 18282 - DNA, 201 bp, Homo sapiens
gccctgcggatagtggtgcctcttccaagatgtaaggtctgaggtcaagagatgtagactcagaggtcaggaggggcctcaagatttgattgccttgaacscccggttctactctgtctgggaatctgtggcttcctggggtggggtggggtgggaactccttctgcacaggtacctctggatcaggctcctgcttccgta

SEQ ID NO: 18283 - DNA, 201 bp, Homo sapiens
ctatctcaaaaaaaaaaaaaaagaaaagaaaataagaaaaaaagaaggaaatatgagaaatatgaggctactactgacatcaaggaggcccacccaaagcwgtcagttcccataaaactcttttgggattggtccctgcttggataaagacttgccaggagggatggagtttggcagggaggcagcacgggagctcgcaag

SEQ ID NO: 18284 - DNA, 201 bp, Homo sapiens
acttgaacccaggaggtggaggttgcagtgagccaagattgcgccattgtactccagcctgggcaacaagagcaaaactctatctcaaaaaaaaaaaaaaagaaaagaaaataagaaaaaaagaaggaaatatgagaaatatgaggctactactgacatcaaggaggcccacccaaagctgtcagttcccataaaactctt

SEQ ID NO: 18285 - DNA, 201 bp, Homo sapiens
aggaaagctgcgacacgccttacactaaaaatatgtgttaggtgaacattcaggcatgaactatagcgctgctggccacaagttcaatattaatgaatcawcaatatatattaaattatgtttgtttgttttgagagggagagtctcgctctgtggcccaggctagagtgcagtggtgcaatctgagctcacggcaacttc

SEQ ID NO: 18286 - DNA, 201 bp, Homo sapiens
gagattatacagtccatcctcaacacttgtggattctgtatatgcacgttgctaatatttatttttaaagccaaaatctatactctgcactttcttggccrttcacagacatgcacagagtgcggaaaaattgtcacctgacctgacatgcatattcccagctgaagctgaacaggcaatattctgcctcttcatttcagc

SEQ ID NO: 18287 - DNA, 201 bp, Homo sapiens
aaaaattagctgagtatggtggcatgtgcctgcagacccagctacttgggaggctgaaatgagaggatcacttgagcctgggaggcagagattgcagtgakccgagattgcgccactgcactccagcctgggtgacagagagacactctgtttcagaaaaaggaaggtgcttcagccagtagatggccaggttagaatctg

SEQ ID NO: 18288 - DNA, 201 bp, Homo sapiens
gagccttgacagaaaaagaaaataaatttcagtattcatcattcataatacggggaaatagtaatgaaacttttgtttcagtttatatctgtgcatgtatrtatgttcgcaggcatatggagtatggaacatttaaaactgtttcttatgttaatcacaataaaactagtataaccactgacccagtggtcaacagctgga

SEQ ID NO: 18289 - DNA, 201 bp, Homo sapiens
aaacaaggccactccataatcatgagtgaacacagacaaaaacatgaacattgtctaagccacttactggtctcgatctactgacatattagccctatagrtgggctaatatgaataacggctgcttctttactacttatgacactagcctcaattcattcttcccatcttctacgtaaggactattaagatactcagaca

SEQ ID NO: 18290 - DNA, 201 bp, Homo sapiens
aagaccctatctcaaattaaaaacaaacaaacaaacaaaaaaaaaacaggctgtgtaactctgtacctcagttttatcatctgtgacattgagttaacagyagtacctccctcatatggtttattaagattaaatgagctaatatttataaaatatttggaaaagcacttggttcataggaagatttattaaataaaacct

SEQ ID NO: 18291 - DNA, 201 bp, Homo sapiens
gagatgggaggattgcttgaggccaggagttggagaccagcctggtcaacatagcaagaccctatctcaaattaaaaacaaacaaacaaacaaaaaaaaaacaggctgtgtaactctgtacctcagttttatcatctgtgacattgagttaacagtagtacctccctcatatggtttattaagattaaatgagctaatatt

SEQ ID NO: 18292 - DNA, 201 bp, Homo sapiens
ttgtgaagctgagatgggaggattgcttgaggccaggagttggagaccagcctggtcaacatagcaagaccctatctcaaattaaaaacaaacaaacaaamaaaaaaaaaacaggctgtgtaactctgtacctcagttttatcatctgtgacattgagttaacagtagtacctccctcatatggtttattaagattaaatg

SEQ ID NO: 18293 - DNA, 201 bp, Homo sapiens
aacccgggaggcggagcttgcagtgagcagaaattgtgccactgcactccagcctgggcgacagagtgagactccgtctcaaaaaaaaaaaaaaaaaaaaatccctgttcgtagagctcatcactgtggacccagcaccaggctacgtacctgatgaatagggagacgttgatcctggtggaagcccattgccctagcgtg

SEQ ID NO: 18294 - DNA, 201 bp, Homo sapiens
catctcagcactttgggaggccaaggcgggtggatcacgaggtcaggagattgagaccatcctggccatggtgaaactccatctctactaaaagtaaattwaaaaaaaaaattagctgagcatggtggcgggtgcctgtagtcccagctacttgggaggctgaagcagaagcaaggtgagaacccgggaggtggagcttgc

SEQ ID NO: 18295 - DNA, 201 bp, Homo sapiens
catttctaagagttcaaaaattaggtttctccctgacttctcgtttctaccacctccttttattttccaccttactttttgtttttaattaggcaatgtayctaggagactgtttcatatccacgtgcatcagtctgcctccactttttaaatagctacatagtattttattacatggatagatcataatttatcccatta

SEQ ID NO: 18296 - DNA, 201 bp, Homo sapiens
ggctcgctgtatcttcccacctcagcctcccaagtagctgggactacaggtgcacaccaccatgcctggcttgttattttaaataataataataataatgyttttgaaaggtagtatatacccacagtcaaacatttctaagagttcaaaaattaggtttctccctgacttctcgtttctaccacctccttttattttcca

SEQ ID NO: 18297 - DNA, 201 bp, Homo sapiens
tttggcaaaatatatcataattttgcttgtttatttgtttttagagacagagtcttgctacgttgcccaggctggacccaaactgggctcgctgtatcttyccacctcagcctcccaagtagctgggactacaggtgcacaccaccatgcctggcttgttattttaaataataataataataatgtttttgaaaggtagta

SEQ ID NO: 18298 - DNA, 201 bp, Homo sapiens
gtttgaaccggggagacagaggttgcagtgagtcgagatcgcaccaccgcactccagcctggggaacaagagtgaaacaccatctcaaaaaaaaaaaaaaatgtattgcaaaaggcattggaggccaccataaagagtttgaacttaggaccttgttgggagtgagaagccacagggcctttggaatgaggagtgccacag

SEQ ID NO: 18299 - DNA, 201 bp, Homo sapiens
accccatctctactaaaaatacaaaaactagctgggcatggtggcacgtgcctgtaatcccagctacccgggaggctgaggcaggagaatcgtttgaaccrgggagacagaggttgcagtgagtcgagatcgcaccaccgcactccagcctggggaacaagagtgaaacaccatctcaaaaaaaaaaaaaaatgtattgca

SEQ ID NO: 18300 - DNA, 201 bp, Homo sapiens
tgaagagcaacaaagagacttgggataaattaagatggtactgctggccaagcgtggtggctcctgcctgtaatcctagcactttgggaggccaaggtggkcagatcactttaggtcaggagttcgagaccagcctggccaacatggtgaaaccccatctctactaaaaatacaaaaactagctgggcatggtggcacgtg

SEQ ID NO: 18301 - DNA, 201 bp, Homo sapiens
gaactggacagctagaaaacatgatgctacatgaagcaaaaacccttttttcattttattatgaaaattttcaaacatagagcaaagttaaaagaatttamtagtgaacaccatatgcccctcacctaggattctaccattaacattttactatgcttattttatcactcttccatccatcctttcgtccatccacacatc

SEQ ID NO: 18302 - DNA, 201 bp, Homo sapiens
ctactcaggaggctgacacggaaggatcttttgagcccaggagtttgagtccagcctgggaaacatagcatagaccttgtttcttaaaaaaaaaaaaattrataacaataaaaagaactggacagctagaaaacatgatgctacatgaagcaaaaacccttttttcattttattatgaaaattttcaaacatagagcaaag

SEQ ID NO: 18303 - DNA, 201 bp, Homo sapiens
agctactcaggaggctgacacggaaggatcttttgagcccaggagtttgagtccagcctgggaaacatagcatagaccttgtttcttaaaaaaaaaaaaawtaataacaataaaaagaactggacagctagaaaacatgatgctacatgaagcaaaaacccttttttcattttattatgaaaattttcaaacatagagcaa

SEQ ID NO: 18304 - DNA, 201 bp, Homo sapiens
cagctactcaggaggctgacacggaaggatcttttgagcccaggagtttgagtccagcctgggaaacatagcatagaccttgtttcttaaaaaaaaaaaaattaataacaataaaaagaactggacagctagaaaacatgatgctacatgaagcaaaaacccttttttcattttattatgaaaattttcaaacatagagca

SEQ ID NO: 18305 - DNA, 201 bp, Homo sapiens
ccagctactcaggaggctgacacggaaggatcttttgagcccaggagtttgagtccagcctgggaaacatagcatagaccttgtttcttaaaaaaaaaaawattaataacaataaaaagaactggacagctagaaaacatgatgctacatgaagcaaaaacccttttttcattttattatgaaaattttcaaacatagagc

SEQ ID NO: 18306 - DNA, 201 bp, Homo sapiens
cgcctgtagtcccagctactcaggaggctgacacggaaggatcttttgagcccaggagtttgagtccagcctgggaaacatagcatagaccttgtttcttwaaaaaaaaaaaattaataacaataaaaagaactggacagctagaaaacatgatgctacatgaagcaaaaacccttttttcattttattatgaaaattttc

SEQ ID NO: 18307 - DNA, 201 bp, Homo sapiens
acgcctgtagtcccagctactcaggaggctgacacggaaggatcttttgagcccaggagtttgagtccagcctgggaaacatagcatagaccttgtttcttaaaaaaaaaaaaattaataacaataaaaagaactggacagctagaaaacatgatgctacatgaagcaaaaacccttttttcattttattatgaaaatttt

SEQ ID NO: 18308 - DNA, 201 bp, Homo sapiens
gaggctggaaatttgcaaaatacagcaaaggcattcaaaagggtctgcaagccgtgtgcagtggcatacgcctgtagtcccagctactcaggaggctgacmcggaaggatcttttgagcccaggagtttgagtccagcctgggaaacatagcatagaccttgtttcttaaaaaaaaaaaaattaataacaataaaaagaac

SEQ ID NO: 18309 - DNA, 201 bp, Homo sapiens
gagcactcagcttccaggaataagatccagaacctcagaaccggcttgacgaggaaatagaagctgctaccaacgctcctgcccctgttctgccaatgctyctctggggcaggaactcatcctgcagctactagtaaaccatgatccccatggaagctggtctctgccaccattcatgccaacagacctgcctcctgcagg

SEQ ID NO: 18310 - DNA, 201 bp, Homo sapiens
aggctgtggtccctgccctgtgcctccagctgagaagtcctcactttccatggcttctgtcccaactccaggctactgctggtcaacaagtcctttcagcrtcttcattcccctcccttgaccatatgggaacttctggatccctgcctgccgtggacaggaggcttgtttcaggcctacctctcaagctcctctgtctgc

SEQ ID NO: 18311 - DNA, 201 bp, Homo sapiens
actcttccagtccaagcggtcttgtaattataatccagcccctgccgcgtaagtgcttaatctctcagactcctcctccttctgttctcctccaggattgyatctagggagcctggaatgggggcttctgtgagggaggttgggacccacatgttctctgtttacagacttgtctgctttcgcctggtccttgattggtga

SEQ ID NO: 18312 - DNA, 201 bp, Homo sapiens
gaggcaggattgcttgaggctaaatttaagaccagcctggcaacatagtgggacccccatctttacaaaaaattttaaaattagccgggtgtggtggtgcrtgtctgtggtcccagctcttcaggaggctgaggtgggaggatcacttgagcccaggaaggtcgaggtgagagtgagctgagatggcgccactgcactcca

SEQ ID NO: 18313 - DNA, 201 bp, Homo sapiens
gcttactccttctttgttgcaggatatcctccaacagcttctcaagaaagggcccttaaaggcagatcttttgagaccttgcatgtctaaaatgcattttrtcttcacacttggcttatagtttggctgggtatagaatcctacaatggaaatgattttcccttggaattttctgcactctagtgttattgttgggaaaac

SEQ ID NO: 18314 - DNA, 201 bp, Homo sapiens
ttgatccatgtagtaaaatcatgtttacttttcctttcctcagtaacattttgctttcccttccctggagttaatgattcaaagtctagcctttatattgrcttagttttctatacacccactactatttcaatcccaaacattcactaattttttaaatagcctctcaagacttttagacacaccaggtattctatcaga

SEQ ID NO: 18315 - DNA, 201 bp, Homo sapiens
tactttactatcaggtgcttaccttattaagctttgtaaattcacagttgatccatgtagtaaaatcatgtttacttttcctttcctcagtaacattttgytttcccttccctggagttaatgattcaaagtctagcctttatattggcttagttttctatacacccactactatttcaatcccaaacattcactaatttt

SEQ ID NO: 18316 - DNA, 201 bp, Homo sapiens
gatgggcatttgggttgcttctgcctttcagctattgtaaatgctactaccataaccatgcctgcacatgtgcttattggaaattttacttcttttgagtrtatacttgcaagtggaatttctgggttttttgataattctgttgaacttttgagaaacaatgacttttttcatagatgttcttttaagctgctaagtttg

SEQ ID NO: 18317 - DNA, 201 bp, Homo sapiens
catataaaaggaatcagacaatatatgactttttgtctgtcttctttcacttcgtataatgttttcaaggtttagtacaattgttttcaaggcttatctaygttgtaagatgttatcagtactttgtctcacttttcggctgagtaatgctccatgcatattccaccgtttatccattcatctgaggatgggcatttgggt

SEQ ID NO: 18318 - DNA, 201 bp, Homo sapiens
aacaggcaccttatacccataaagcaactcctcctcattcctcacctccaacccagcccttggcaaccatcggctttccgtatcattttacctattctggscatctcatataaaaggaatcagacaatatatgactttttgtctgtcttctttcacttcgtataatgttttcaaggtttagtacaattgttttcaaggctt

SEQ ID NO: 18319 - DNA, 201 bp, Homo sapiens
tgggtagcttctaggacctgagagcagtccttagctgacagctagcaaaaaaacaaagacctcagtcctagaacttccggtttctcccaacaatctgcatragcgtggaagaggaccccaagcctcagatgagaagcggccctgggtagcagcctggtttcagccatgtgagaacatcagcagagaatccaattaaatagc

SEQ ID NO: 18320 - DNA, 201 bp, Homo sapiens
cacttggcaagtgactatgggtagcttctaggacctgagagcagtccttagctgacagctagcaaaaaaacaaagacctcagtcctagaacttccggtttytcccaacaatctgcatgagcgtggaagaggaccccaagcctcagatgagaagcggccctgggtagcagcctggtttcagccatgtgagaacatcagcaga

SEQ ID NO: 18321 - DNA, 201 bp, Homo sapiens
gtgaagtccagaataggacaaaaaggctgactctcccctgaacaagagggaattcctcctgcctgcctgacttcgaatttggacatcagcttttcccttcyttcagactcaaactgaaacatcagctcttcctgattcttgagcctgctgggcttcagagtagaactataccgttggctgtcctgggtctccagcttgctg

SEQ ID NO: 18322 - DNA, 201 bp, Homo sapiens
ttatagaaatgaagaacagcgtagtggttgccagtaggacagagggagtgtaggacagaagttgatgaagttgatgtggttataaaagaacacaagaggcygggcgcggtggctcacgcctgtaatcccagcactttgggaggctgaggtggacggatcatgaggtcaggagatcgagaccatcctggctaacacggtgaa

SEQ ID NO: 18323 - DNA, 201 bp, Homo sapiens
taaagaaagtatttttatttttactttttattaatgacttacacacttactaggcctgcccttagcaattgccaggctggggcaggagtagaaacggaggyttatgaatttggtatgcaaatatttaaaagtcataagtcatgttaataagctgctaaaaaatatgcattgtctactccagccttgacaaatatgtatatt

SEQ ID NO: 18324 - DNA, 201 bp, Homo sapiens
ctcctgggctcaagcagtcctctcgcctcagcctcccaagtagttgggactacaggcactcaccaccgcacctgtctaatttaaaaaaaaaaaatttttttagagacagggcctcactatgctgcacattgcttgacctcctggtctcaagtgatcttcccacctcagcctcccaaagcgctgggattataggtgtgagcc

SEQ ID NO: 18325 - DNA, 201 bp, Homo sapiens
cttgaactcctgggctcaagcagtcctctcgcctcagcctcccaagtagttgggactacaggcactcaccaccgcacctgtctaatttaaaaaaaaaaaawttttttagagacagggcctcactatgctgcacattgcttgacctcctggtctcaagtgatcttcccacctcagcctcccaaagcgctgggattataggtg

SEQ ID NO: 18326 - DNA, 201 bp, Homo sapiens
ccttgaactcctgggctcaagcagtcctctcgcctcagcctcccaagtagttgggactacaggcactcaccaccgcacctgtctaatttaaaaaaaaaaawtttttttagagacagggcctcactatgctgcacattgcttgacctcctggtctcaagtgatcttcccacctcagcctcccaaagcgctgggattataggt

SEQ ID NO: 18327 - DNA, 201 bp, Homo sapiens
caaatgttttttattttcttgcttgtacttttcagttccagagtttctgattctcttttggtttttatctcctttattaatatttccattttatttatacmtttgttctttattttcactacatttttctttagttctttgagtatctttaagacagttattccaaagtctttgtccagtagatcaagccttttccagaaa

SEQ ID NO: 18328 - DNA, 201 bp, Homo sapiens
ccttttgggattcccacaatgcttatttttgcccacttaatggtgtccaccacaggtttgttaggttatgtttacttttcttcaatctttttttttttctrtttcccatattcaataatttccattgtcctgtcttcaagtttgctgattctttcttctgcctgttcaaatttgcttttcaatccctctatcaaatgtttt

SEQ ID NO: 18329 - DNA, 201 bp, Homo sapiens
tctccttttgggattcccacaatgcttatttttgcccacttaatggtgtccaccacaggtttgttaggttatgtttacttttcttcaatctttttttttttctatttcccatattcaataatttccattgtcctgtcttcaagtttgctgattctttcttctgcctgttcaaatttgcttttcaatccctctatcaaatgt

SEQ ID NO: 18330 - DNA, 201 bp, Homo sapiens
gcctttttagtatatcagctcactgcctttgggcctctaaagtttttaatgagaaatttacttttaatcttattgagattcccttgtatgtgagaagttgmttggtttttgctgctcttaagattttctgtttttgatttttaagagtttgattttaatgtgtcttggtgtaggtctctttgagttcattctacttggagt

SEQ ID NO: 18331 - DNA, 201 bp, Homo sapiens
ttgcttgttaatttgtttaagttccttatagattctggatattagacctttgtcagatgcatggtttgcaaatattttcttccatcctgtaggttgtctgtttactctgttgatagtttcttttgctgtgcagaagctctttaatttaattaggtcccatttgtcagtttttgtttttgttgcagttacttttgtcttctt

SEQ ID NO: 18332 - DNA, 201 bp, Homo sapiens
tttgcttgttaatttgtttaagttccttatagattctggatattagacctttgtcagatgcatggtttgcaaatattttcttccatcctgtaggttgtctgtttactctgttgatagtttcttttgctgtgcagaagctctttaatttaattaggtcccatttgtcagtttttgtttttgttgcagttacttttgtcttct

SEQ ID NO: 18333 - DNA, 201 bp, Homo sapiens
ttttgcttgttaatttgtttaagttccttatagattctggatattagacctttgtcagatgcatggtttgcaaatattttcttccatcctgtaggttgtctgtttactctgttgatagtttcttttgctgtgcagaagctctttaatttaattaggtcccatttgtcagtttttgtttttgttgcagttacttttgtcttc

SEQ ID NO: 18334 - DNA, 201 bp, Homo sapiens
tttttgcttgttaatttgtttaagttccttatagattctggatattagacctttgtcagatgcatggtttgcaaatattttcttccatcctgtaggttgtctgtttactctgttgatagtttcttttgctgtgcagaagctctttaatttaattaggtcccatttgtcagtttttgtttttgttgcagttacttttgtctt

SEQ ID NO: 18335 - DNA, 201 bp, Homo sapiens
ttatttttttgactttttactaatagccattctgcctggtatgagatggtatctcattgtggttttgatttgcatttctccaataattaatgatgttgagmagtttttcataggtttgttggccccatatatgtcctcttttgaaatgtgtctgtttatgtcctttgcccaatttttaatggggttgtttgtttttgcttg

SEQ ID NO: 18336 - DNA, 201 bp, Homo sapiens
accaaagaactaaatctaagagctaaaactataaaatccttagacgaaaacagagggcaaatatttcatgacattggatttggtaatgccaccaaaagcayaagcaataaaagaaaaaatagacaaattggacttcatcaaaattaaaaactttgtaaacactatcaatagagtaaaaaggcaactcaaagaatgggagaa

SEQ ID NO: 18337 - DNA, 201 bp, Homo sapiens
tgagcaggcttgtgtgaggcctcgagaaagcctcaatatttcacatatatttggccttgaggtcttatgccagcaggaagtaaaggctaaagcagaaatcstagaactgccaagtgatgcagatgtgccccaacacacacagagagccccttagcaaaggatacaaacacttattgatcaaggaatttaagagaatctccg

SEQ ID NO: 18338 - DNA, 201 bp, Homo sapiens
gctgcctggagcagtgataccaatttagtcaaacaagagcctagccaaaaacgtagagaaagatgtgagaagtgaaatatccacattgaaaagatctggcwtattcctgaggatctagaaggctgttttgtgagcaggcttgtgtgaggcctcgagaaagcctcaatatttcacatatatttggccttgaggtcttatgcc

SEQ ID NO: 18339 - DNA, 201 bp, Homo sapiens
ttacaataatctgaggagcattcattccagaaaattgcaaaatctcaataaaaacaccaagatctgtgactttgtaatttgacctgtttccctcccccttyctcttctctgtagccttataacccggaagcctcacaatcacccatatctttaaaaaccagtaacgcagccaccagatggggcagaccagtttgaagctcc

SEQ ID NO: 18340 - DNA, 201 bp, Homo sapiens
cctgggaggcagaggttgcagtgagctgagatcacaccactgcactccagcctgggtgacatagcgagactccatctcaaaaaaaaaaaaaaaaaaaaaamaaaggcaatcagttgcacttagcagtggctagctcaataacaccctagtattggctctttctctaggaaagccctccttaataaagtgtctacatcttca

SEQ ID NO: 18341 - DNA, 201 bp, Homo sapiens
tttcagctgagacctgaaggatccaagcctggtaagtccatctgtagcaatggacattcactggctgaatcgaggagaggagaaaatgttgaacggatatmaggaaactcacagaccagctggaaatattagggaatcaggcttagaaaacacgcaggcgcaaagagtgaccatgaagcccagcactacagccaaaactgc

SEQ ID NO: 18342 - DNA, 201 bp, Homo sapiens
aattgtgtttcagctgagacctgaaggatccaagcctggtaagtccatctgtagcaatggacattcactggctgaatcgaggagaggagaaaatgttgaamggatatcaggaaactcacagaccagctggaaatattagggaatcaggcttagaaaacacgcaggcgcaaagagtgaccatgaagcccagcactacagcca

SEQ ID NO: 18343 - DNA, 201 bp, Homo sapiens
ctggggattcagcacagatgattagtgctttctgaaggtttatcatcaagggggtgggaaggtgggcagtgggatggaagtgggggaaggtagggggagayagatgataagatggataatcaaataaaaaatataaattcaagtaatgattggtacactgatgaataaaagtcaggatgggggtatgtcgggggtgggatg

SEQ ID NO: 18344 - DNA, 201 bp, Homo sapiens
ggagaggtcttgtccaaggtcacgggacacccatggccaccaggcctctaagctcctggctggaggccactcacaaagtcagggcagatgggcctagcttmtgagtcagaaccagctctcccctttttcttacctacctcctctcaagagtctagtgtccaccaaggaagtctagtggccctgaaggaggatcatggacct

SEQ ID NO: 18345 - DNA, 201 bp, Homo sapiens
gtatctctcccacttggctcttccagagttatatccttcataacaaaccaggaatggtaagtaaactgtttttctgagttctgtgaacccctctagcaaaytatgaaacctaaggctggggccagttatgagaaccccaaatctgtagcaaagttggacagaagtgtgagtaaccccgagtaaccaacacttgtgactgga

SEQ ID NO: 18346 - DNA, 201 bp, Homo sapiens
atgaagtgcagaatcttgaacaaagtgataactggagcagcaaagccagagcatggcaacctccttgtatttctgccatgtccatccctgcccattgtagmgctagcaccatggttaagactatagatactaaactcagactctctgggttcaatttttgactccattcattatcaactttgtgaacttgagaagtatgca

SEQ ID NO: 18347 - DNA, 201 bp, Homo sapiens
aatgaagtgcagaatcttgaacaaagtgataactggagcagcaaagccagagcatggcaacctccttgtatttctgccatgtccatccctgcccattgtarcgctagcaccatggttaagactatagatactaaactcagactctctgggttcaatttttgactccattcattatcaactttgtgaacttgagaagtatgc

SEQ ID NO: 18348 - DNA, 201 bp, Homo sapiens
attcatccgccgaaggactggctgttttcagcattggagtattaagaataaagttgctatagacattcatatacagattttagtgtgaacataagttttcmtctctctaggttaaatgccaatgaggacaattgctgagtcacacggaaattgcatgtttagttttgtaagaagctgccaacctgtttccagagacgctgt

SEQ ID NO: 18349 - DNA, 201 bp, Homo sapiens
cgccactgctgagctgctacaccagtcttgagactgtcaaattctggacactgtatgaactaaacaaataaagatctttaggattttaagccaccattgtygaagatgctgttacttgcagagaaggcatttttaatcattacgaagaaaaacagatccacactcgaggagtttttatctaacgtgactggtagaatgtgc

SEQ ID NO: 18350 - DNA, 201 bp, Homo sapiens
taatattgtctaataacaacaatatttagtgagagcttatcatgtgccaattagatagatagtattgttatttctattttacagagaaggaagctgagtcyctgagatgttgagtagcttctcatagattaataagctggtaatggcgaagcagacagtgaattcaggcagtctagctccagagcccatgtgcacaaccac

SEQ ID NO: 18351 - DNA, 201 bp, Homo sapiens
gttcttgattatcctgctcagtgccttgcttgtgggcctcttgtccccactttacagataggaaaactaaagcttgccgggacagattaatgaaaacagtwataaaagttcacacactgacctcatggtgaggcagtttgtatggtggtttgatgggggaagagaggtgagagaagaggacagattccagagcctaaggag

SEQ ID NO: 18352 - DNA, 201 bp, Homo sapiens
cagctggttgcttggcccttggaactcacccatgggcggtaccaggtctgtggttgctggacccacggggctctggatatgggggttccaagcagcagagrggcctggggtgccacccacagggcacagctgctctggatttttctggccctcagcctcatctttacttgagtccacagcctcaggctccctcccctgtga

SEQ ID NO: 18353 - DNA, 201 bp, Homo sapiens
aaagctaaatgtgatcatggatgtcaaggccttaacagtgcctcggtgggcacagtcataatacaaataatatttattgtaccagaaggcctagggatcckggctctgccccttaactggctgtgtgactttggggaaattacttaaactctctgcacctcagtttcctcatttgtacaacacagataataatggtgctca

SEQ ID NO: 18354 - DNA, 201 bp, Homo sapiens
tggcttagtaagtaagacgggataaacagacctcccacagggaggagaataccaacttccctttctgtaggcacccccaatcttgatcagccagtcatttyttgctgaagatacccccaaaccttaacactgattcttttaaacacctactcacacccccaactcacactttagctcctatctccaggaacatggcacttt

SEQ ID NO: 18355 - DNA, 201 bp, Homo sapiens
gaaggaacgaggccctttggcgccactgctgagctgctacaccagtcttgagactgtcaaattctggacactgtatgaactaaacaaataaagatctttargattttaagccaccattgtcgaagatgctgttacttgcagagaaggcatttttaatcattacgaagaaaaacagatccacactcgaggagtttttatcta

SEQ ID NO: 18356 - DNA, 201 bp, Homo sapiens
gataggaaaactaaagcttgccgggacagattaatgaaaacagtaataaaagttcacacactgacctcatggtgaggcagtttgtatggtggtttgatggrggaagagaggtgagagaagaggacagattccagagcctaaggaggatgctcagcaggacctggtgagggctctgttgtgagtgataaaggtgagagaaga

SEQ ID NO: 18357 - DNA, 201 bp, Homo sapiens
ctgttttttagactaggaatttgggcagggcaccatgagaatggtttggttccactccaagatgcttcttctggggatatcttaatgactgcatatgtctrggatggtttaacaggacctctgtctggggctttggttctggtggttggcagttcctaggttgccatccatgtcatgtctcctggaactggaatgtccagg

SEQ ID NO: 18358 - DNA, 201 bp, Homo sapiens
taagaccttgcagtcagcagctcaggctctgggggaagcaagtcactgtaggtagacggagccttgaaccctggaggcttctggtggcagctttctggggktggttgggaggtgctgccagcagacagtgggatggatgggatgacctctctggaaccctgtgtgtaccagacacccagggctctggaagggtatgaaaac

SEQ ID NO: 18359 - DNA, 201 bp, Homo sapiens
ctggctagaattcaaggctgcacacatcctggtgttttaagctgttgcttatagtactctggcaaatagttttgctaatctaactacttgagtttaggtgytctctgctcctgggactcccaatgcctctcccttagggttcatctcaaagcttgacccaaaaggtttgaggtctatctgcttaatgccagtcttctccac

SEQ ID NO: 18360 - DNA, 201 bp, Homo sapiens
cactcacaaagtcagggcagatgggcctagcttctgagtcagaaccagctctcccctttttcttacctacctcctctcaagagtctagtgtccaccaaggragtctagtggccctgaaggaggatcatggacctctgcctctttagatgcctgcagaacagagtggagctgtgggcccaggagtcttctgctctcacccag

SEQ ID NO: 18361 - DNA, 201 bp, Homo sapiens
ggcactacttttatccccacattacacataagaaaactgaggcctagaaaggttaacttatttgccaatagagaactaagtgatgaagctgaaatttgacygaggcagtttgactccagagccaagatctgaggcaaccatctaaacacaggtaacccatctaaacattcatacattgagcatctactacatgccaggaac

SEQ ID NO: 18362 - DNA, 201 bp, Homo sapiens
ctcgtaggtgctaacaatgtgtgatgtatggaaagacagacgaggccacaataggacacaggtgacagggatgaggccacctcttacctccaggcttgccrcacagctctggcccacataaggtgggcaaggacaaggtctgctgatgacagtactagagcatcttgccttccaactgggtgagcacctccctgcaagagc

SEQ ID NO: 18363 - DNA, 201 bp, Homo sapiens
cttagagcaaattctctacattccttgctctcatactagtcttcacatacctttataatcacttaccatactttattgcaatcatttgtttatgtgtcaayggttgccaatctgcaggtggaaacacaggtaaatatatataaaatgatgtattgatgtcacattacaatagattatatgttcagtgaccttaacatgata

SEQ ID NO: 18364 - DNA, 201 bp, Homo sapiens
gggtgacagagcaagaccttgtcttaaagaaaaaaaaaaaaagatcactgatcatagaagcaaacacatgctcttggaaaaatggctcttatagagttgcytgactcagggttgccacaaaacttcaatttgtaaaaaatgcaatatctgcaaagtacaataaaatgaagcacagtaaaataaggtatgcctgtctttgtc

SEQ ID NO: 18365 - DNA, 201 bp, Homo sapiens
aatgcttattgaaactttaccagaagacatgatgaagtgatcagatgccatcctgcgactgtagtgaatcaagacaaaaacaaggccactccataatcatragtgaacacagacaaaaacatgaacattgtctaagccacttactggtctcgatctactgacatattagccctatagatgggctaatatgaataacggctg

SEQ ID NO: 18366 - DNA, 201 bp, Homo sapiens
cagcaataccccatctctacaaaaaattaaaataaaaaatacctgctgggtgtggtggcatgctcccatagtcctagctacctggaggctgaggcaggagrattgcttgagcccaagagctggaagtttgcagtgagctatgatcacaccactgcacttacagcctgggtgacagagcaagaccttgtcttaaagaaaaaa

SEQ ID NO: 18367 - DNA, 201 bp, Homo sapiens
tcgcaacttgatatttgcttgaatctttgttgtctccctagaatgctcctagactgagagttctaggatggcaggaagcctgactgttttgttcattgccrtatccccaactcctacagcagcatcaactgcatagtaggtgctcagtacagattcacggaatgaatgaattggggccaacagcatatgaagggcttttaa

SEQ ID NO: 18368 - DNA, 201 bp, Homo sapiens
aacaattcatccgccgaaggactggctgttttcagcattggagtattaagaataaagttgctatagacattcatatacagattttagtgtgaacataagtkttcatctctctaggttaaatgccaatgaggacaattgctgagtcacacggaaattgcatgtttagttttgtaagaagctgccaacctgtttccagagacg

SEQ ID NO: 18369 - DNA, 201 bp, Homo sapiens
tacacttttgatttgttgtttaatatatacgtatctgtaggagttgagagtgagagaaaagagtgaaagacatggtgacaaagaccctcccatgttgtacytgctgcacccttctcctcacatcctctcggcacctgtaggaggggggccagcttcctaacccatgacccaactcagtgggcaggtttgttctagcctctt

SEQ ID NO: 18370 - DNA, 201 bp, Homo sapiens
agaggtctgcactagcagtggggaaagtggtgtatcaggggccctaaactcacatgtctacaggagccccaccgatagaaccccatgagtgagaattacarggtgaagaccatggacaacaagagagtgcgttccctctagggggggctgctattgctcaactctagactgaggtagggcatgcaggcttagcccaggagg

SEQ ID NO: 18371 - DNA, 201 bp, Homo sapiens
tgaagctacaggacatataagccacattttcacatttttttctattggcatgtgtttattgagcatttactgagtgccaggcaaccagtgaacaaaatgcrtatgatctttatcttaaaggataaaggagctgacattctagtggggcaggtaaaagtaaacaaataagtaaaataactagtatttcagatactgataagt

SEQ ID NO: 18372 - DNA, 201 bp, Homo sapiens
cctgggcaacacagtgagaccctgtctcaaaaaaaaaaaaaaaagtacatgaggtctgtgggtcttttgtcctaagatttaactatgaccagctgggtgcrgtggctcacacctataatcccagcactctgggaggccgaggcaggcagatcacctgaggtcaagagttcgagaccagcctggccaacatggcgaaaaccc

SEQ ID NO: 18373 - DNA, 201 bp, Homo sapiens
tccaggaataagatccagaacctcagaaccggcttgacgaggaaatagaagctgctaccaacgctcctgcccctgttctgccaatgctcctctggggcagkaactcatcctgcagctactagtaaaccatgatccccatggaagctggtctctgccaccattcatgccaacagacctgcctcctgcaggtaatccatgcca

SEQ ID NO: 18374 - DNA, 201 bp, Homo sapiens
cacccgtcatattcctcatgagtctttcaaaaacatgcaaagaaaaaatgaaataaaaataaagttcacttttttctttctttagaaacagggtctcactytgttgcccaggctggagtgcagtagcaccatcatagctcattgtaaccttgaactcctgggctcaagcagtcctctcgcctcagcctcccaagtagttgg

SEQ ID NO: 18375 - DNA, 201 bp, Homo sapiens
tcggcctcccaaagtgctaggattccaggcgcgagccaccacgcccatcctaataatgtatctttaaacagaaacgcacatataataaggttatatactgwtcaactgatgaataagttgggaccagaggctcacaggaacctaaacctgtatttattttccctaagggcaatgggccagttctcattaattcaacctttg

SEQ ID NO: 18376 - DNA, 201 bp, Homo sapiens
gatctactgacatattagccctatagatgggctaatatgaataacggctgcttctttactacttatgacactagcctcaattcattcttcccatcttctaygtaaggactattaagatactcagacatagacttgcctcattcccagagaagcctccaatcccaagcaaagccctgcttctttgaactctccccaaaccac

SEQ ID NO: 18377 - DNA, 201 bp, Homo sapiens
aaagttttggagtttcagaggtttgtgcctgccctagaatgactggggctaacttgatgtgaaagatttggttttactttctgttgtgagaattggcaagrgtaatggaaaagccccctggaactgttgttccagctcgtgccacatggggtcactgttgaacactggtcctgcagagtgctcactcaccacagcaggggc

SEQ ID NO: 18378 - DNA, 201 bp, Homo sapiens
ggtgtggtggtgcatgtctgtggtcccagctcttcaggaggctgaggtgggaggatcacttgagcccaggaaggtcgaggtgagagtgagctgagatggcrccactgcactccagcctgggcaacagagtgagaccctttctcaaacatcaacaagcaaacaaataaaaaactggaagttctgagtgtgtgcttgagggtg

SEQ ID NO: 18379 - DNA, 201 bp, Homo sapiens
cgtggccattctgcagaagtggctcaagggcaggtacaagccagtcaagtacggccagtgctgggtcttcgccggagtcctgtgcacaggtaccctgggaragaagggccccagggtacctgtgcccccagcttcctctatctaaatgtatttacatatatttgcatatgctgcaacccatcttcattgatggattcattg

SEQ ID NO: 18380 - DNA, 201 bp, Homo sapiens
cttcctccactcttagggtttttttgtttgtttatttgttttgtttttaaagaagaacggccgggcatgatagctcacgctcagcattttgggaggctgaygtgggtggatcgcctgaggtcaggagttcaagactagcctggccaacatagtgaaaccccatctgtactaaaaatacaaaaaattggctgggcgtggtgg

SEQ ID NO: 18381 - DNA, 201 bp, Homo sapiens
gagagacaggaaccaatggagagcttgagaacaacgagtgatcttagattttaacaggatccttctggcttccatgttgagaatgagccctgaggatatgygggggtgggggcacaggggaagtgaaatagggaacccagtgagcatgacagcatctagaaaatgaaaggggccatagtacctcccttaggtgtatgttag

SEQ ID NO: 18382 - DNA, 201 bp, Homo sapiens
atagatcataatttatcccattaatgaagacaggagagttttcactctttctgttataattaatgttgcaataaatatcctcgtacttaaatctttccacrcttttggatccatctgtcggacaaattcctgcacatggaattgctgtcttgaagaatggctcctctcaacaatttcacttggcagaaattgtcccatcat

SEQ ID NO: 18383 - DNA, 201 bp, Homo sapiens
tttgacctgtttccctcccccttcctcttctctgtagccttataacccggaagcctcacaatcacccatatctttaaaaaccagtaacgcagccaccagayggggcagaccagtttgaagctccttatgtagcctcatccccagaacattgtcactatttgattcatcttgcagctccctggaaaggtgttgtttttacat

SEQ ID NO: 18384 - DNA, 201 bp, Homo sapiens
agaccagtttgaagctccttatgtagcctcatccccagaacattgtcactatttgattcatcttgcagctccctggaaaggtgttgtttttacatgatctracttaaattttgccctggaggagaagtcctagtcccaaagtgtttttcaaaaacaatcagcagcacctgtttaacatcacagctgcctggagcagtgata

SEQ ID NO: 18385 - DNA, 201 bp, Homo sapiens
gccagtttggcccagagataacagaacccaggactctactgccaggctatgatgctcacttctaaactgagtatgggccgggtgcagtggctctcacttgkaatctcgcactttgggaggctgaggtgggcagatcacctgaggtcaggagtttgagaccagcctggccaacatggcgaaactgtctctacttaaaataca

SEQ ID NO: 18386 - DNA, 201 bp, Homo sapiens
gtacccctgccctgagctggtggttcgcaggggccagtcgttcagcctcacgctggagctgagcagagccctggactgtgaggagatcctcatcttcacgrtggagacaggtaactgggcttgccagcaccctcttctcgtctgcagctggagggacctgtcttatgactcagtaacataagaccttgcagtcagcagctc

SEQ ID NO: 18387 - DNA, 201 bp, Homo sapiens
actttctgttgtgagaattggcaagggtaatggaaaagccccctggaactgttgttccagctcgtgccacatggggtcactgttgaacactggtcctgcasagtgctcactcaccacagcaggggctgtaggagctcccaatcttgggacacatgtgtcagctatgtgagttcctacccacatgttcagtcattatcccca

SEQ ID NO: 18388 - DNA, 201 bp, Homo sapiens
agcacttggttcataggaagatttattaaataaaacctatccaatggtctagccaacaattactgacatttcctgtatgcttggcatcaaataagatacarccaagagttgcatgacaagtgtcctttggtggggagtacctggtgatgtaacttcagtggttctcaactgtggcagattatatttcacagggtggtcata

SEQ ID NO: 18389 - DNA, 201 bp, Homo sapiens
tgagccagggatctgcgctcaccttcctttccctttgagacacttgggtagaaatatttgagaagcatggtgacccccctggattttttagctctgtcackctgtgagaatctgcattcatagcccaatccttatggagcgactgaccagggatccctcctctcatcatgcgggttcctttctcctattatgcatctgcca

SEQ ID NO: 18390 - DNA, 201 bp, Homo sapiens
cacctccatcagagttcttgagtgactaggtgcattgtcaatgagcagtaatactttgacaagaatcttcttttctgatcagtaggtctcaacagttggcytaaaatattcagtaaaccatgctataaacagatgtgctatcatcctggcttcgttgttcctttatggaccacaggcatagtagatttagcataattctta

SEQ ID NO: 18391 - DNA, 201 bp, Homo sapiens
tgttgaaagaaattaatgatctaaataaatgaaaaggcatcccattttcattgatcgaaagggtttatattgttaaaattgcaatactctcaaaattgacytacagactcaacaaaatcctatcaaagttacagctgagtttttttcccccaaattagcaacctgatcataaaattcatttggaaacacaagggaacccca

SEQ ID NO: 18392 - DNA, 201 bp, Homo sapiens
gaaagaaaatgaaaatgcaatatgccaaaatttataagatgcagctaaagcagtacacagtggggaatttatagccgtaaaacctatattaaagaagaaaratttcaaatcaatagcctaatcttctaccttaagaacctagaaaaatggctggatgtggtggctcacgcctataatctcagcattttgggaggccgaggt

SEQ ID NO: 18393 - DNA, 201 bp, Homo sapiens
caagaacttagcctaggcagaggtaggcaatggtcagagaaacctggtagcaggtgcttcaaagcctatgccagaggacccagtgggcaagagaggcccargggtgggtaagagccaggacttgggaatcagactgccttggtttagtcccagctgtgctgagctgctctcctctaccagtctccatttcctcatctgtaa

SEQ ID NO: 18394 - DNA, 201 bp, Homo sapiens
gattggttaagaagcaatagatgagtaaaacatcaacttttttgtccgtaataccctccctctcaatataacaagtatttaatagtgtcccttcaccaacytgaaattgaattgacacatcttacctacctctatactccactttttaaaaaattgtatcctaactataatataaatagtaaataagaggaaatcaatttt

SEQ ID NO: 18395 - DNA, 201 bp, Homo sapiens
cagtcaagccttcagatgaacatggccccagctaacatatgattgcaaccccataagaaactccaattaagagctggccagtggagctctgcccaaattcytgacccacaaaaaccatgaaagataacatatgattatcatttttccaagctaaactctgggttaaacagattggttaagaagcaatagatgagtaaaaca

SEQ ID NO: 18396 - DNA, 201 bp, Homo sapiens
ctggaaaccatcccaagtgcacatctatctcctcgccttgggctgccgtatacctaggagcctctccccatgcccgtcagtctcactgtccccatgaggaytaagagggacactggctaggacagaacgtatctgaaatcaccggtagttccccctgcagaatcctggaccctaaccccggctattacaccacatatggca

SEQ ID NO: 18397 - DNA, 201 bp, Homo sapiens
ttcttatagaccgtctctgtgctgaaaatcagcctaaggcataaatttaaggttgtatcgggtctttgctgagcctgccccttttgggagcatgtgcagtygttttttaatttcctccatgaatacagttgcttttgaatgtcctagtgtctaatatctggtccccaaaagcacaaaaacagaaaaatgaagggaaagtca

SEQ ID NO: 18398 - DNA, 201 bp, Homo sapiens
ccatgtaaataccacccaaatcaagatgtagaacatttccatctcctccctaaaatagaatttttttaaatttttttcaattttttattgtggtaaaatakgcatagcataaaattgcctattttaaccatttttaaaggtacagtttagtgatactaaatatattcatgttgttgtgcaaccatcaccatcattcatctc

SEQ ID NO: 18399 - DNA, 201 bp, Homo sapiens
cctctaactttgttcctctccttcaataatgtacaattgtacaattgtactgactactctgggtcttttgcctcttgacataaacttttttatgtcatggytctttaaaaaaatcttaattgatatatattagtaatacatattttgtgggtacacatattttgatacatgtatagaatgtgtaacaatcgaatcagggta

SEQ ID NO: 18400 - DNA, 201 bp, Homo sapiens
aacctgggaggcggaggttgcagtgagccaggatcgcacactgcactccaccctcagcaacaagtgcgaaactcctcaaaaaaaaaaaaaaaaaaaaaaamaaaaaaaaaaaccatggccacaggagaaattaacatcctgttacatgataacagtgatgacaatcactgttactgagcgctggctgtgggctggccattt

SEQ ID NO: 18401 - DNA, 201 bp, Homo sapiens
attgaacacctaggacaaacgcatggcacaggcccaattcagactaataataatagcatctcctgtttagcatctgccagggcctgtgccgtgataccaayttatggccattggttcattgaagagcccctacttgttaggctacaaaaacaaaacagttgtattttttcttatagctgtttccaactatatactttaaaa

SEQ ID NO: 18402 - DNA, 201 bp, Homo sapiens
gagcctgccccttttgggagcatgtgcagtcgttttttaatttcctccatgaatacagttgcttttgaatgtcctagtgtctaatatctggtccccaaaakcacaaaaacagaaaaatgaagggaaagtcagatgtcccacccctttaagtaccctggaatttgcttcagctggagggagaggggcttgcagcaatgaggg

SEQ ID NO: 18403 - DNA, 201 bp, Homo sapiens
cagtcttctaaccaggtgatttctgctgatacagttgctgtattccagttaccaattgctgggtaacaagcaaatgataacttaagccttaaaataatgayagttattggccaggcatggtggctcatgcctgtaatcccagcactttgagatgccaaggtgggcggatcacctgaggataggagttccagaccagcctga

SEQ ID NO: 18404 - DNA, 201 bp, Homo sapiens
gccaggatcgcacactgcactccaccctcagcaacaagtgcgaaactcctcaaaaaaaaaaaaaaaaaaaaaaaaaaaaaaaaaaaccatggccacaggaraaattaacatcctgttacatgataacagtgatgacaatcactgttactgagcgctggctgtgggctggccattttcacatgttatgtagtcattttattt

SEQ ID NO: 18405 - DNA, 201 bp, Homo sapiens
tgggtctgtgttcccactcggcctctcatgtcccaacaggccagcccatgcttttctgaatagcagcaacattcccagaaggtgagagatgaagctgtgargtttctagaggcctggctcagaatgtgcaccatgtcacttctgccacattctattggtcaaagcaattcatgagcccaatccagattcaaggggtgggaa

SEQ ID NO: 18406 - DNA, 201 bp, Homo sapiens
ggtattatttattgaacacctaggacaaacgcatggcacaggcccaattcagactaataataatagcatctcctgtttagcatctgccagggcctgtgccrtgataccaatttatggccattggttcattgaagagcccctacttgttaggctacaaaaacaaaacagttgtattttttcttatagctgtttccaactata

SEQ ID NO: 18407 - DNA, 201 bp, Homo sapiens
tactgatcaactgatgaataagttgggaccagaggctcacaggaacctaaacctgtatttattttccctaagggcaatgggccagttctcattaattcaamctttgcagtgattttacagaacttaatgaccaagaggctgggcaaggtgcctcacacctgtaatcccagcactgtgggaggccaaggcaggcagatcacc

SEQ ID NO: 18408 - DNA, 201 bp, Homo sapiens
gcatagcagctctgagtgacagagtgagatcctgtctcaaaaacaaacagacaaacaaaaagtactacaaatatacagaaaccccgacagtgtgacattgrcataagaagggacatatagatcaaagaaattgaactaagagtccaaaaagaagcccttaaaattatgttcaattgatttctacatgggtgtcaagacaat

SEQ ID NO: 18409 - DNA, 201 bp, Homo sapiens
acctagcttactccttctttgttgcaggatatcctccaacagcttctcaagaaagggcccttaaaggcagatcttttgagaccttgcatgtctaaaatgcrttttatcttcacacttggcttatagtttggctgggtatagaatcctacaatggaaatgattttcccttggaattttctgcactctagtgttattgttggg

SEQ ID NO: 18410 - DNA, 201 bp, Homo sapiens
agacagggtttcaccatgttggccaggatggtcttgatctcctgacctcgtgatccacctgcctcggcctcccaaagtgctgggattacaggcatgagccrccgtgcccggctcgaattttaaattctttagataaataccaaggagcacacttgctgcaccttatggtaagagtatgttttggtaagaaactgacaaact

SEQ ID NO: 18411 - DNA, 201 bp, Homo sapiens
ccaggatcagtattattattaatatttaagaaatatggccgggtgcagtggctcacgcctgtaaccccagcactttgggatgccaaggcagggggatcacytgaggtggggagttcaagaccagcctgaccaacatggagaaatcccgtctctactaaaaatacaaaattagccagctgtggtggcacacgcctgtaatcc

SEQ ID NO: 18412 - DNA, 201 bp, Homo sapiens
ggatgaggccacctcttacctccaggcttgccacacagctctggcccacataaggtgggcaaggacaaggtctgctgatgacagtactagagcatcttgcyttccaactgggtgagcacctccctgcaagagcatgaacgccagctgcctatcacctatgtcaccggctacaggcatggtcctaaggatgaggtgatgtag

SEQ ID NO: 18413 - DNA, 201 bp, Homo sapiens
ataccacccaaatcaagatgtagaacatttccatctcctccctaaaatagaatttttttaaatttttttcaattttttattgtggtaaaatatgcatagcmtaaaattgcctattttaaccatttttaaaggtacagtttagtgatactaaatatattcatgttgttgtgcaaccatcaccatcattcatctcaaaaactc

SEQ ID NO: 18414 - DNA, 201 bp, Homo sapiens
ctcccaatctcctttcctgcaactgcttagtttattggctctctcattcctatgctgatgagcatccctattcccagaagcagcctcttcacccgtcctaygtctggctctaaaccactcctcctcccaaccttgatcacacttgcctggggaagccagcctcaaagagctgaattcaacatatcccattacaatgaatgt

SEQ ID NO: 18415 - DNA, 201 bp, Homo sapiens
cttgagcccaggagatccaggctacaatgagctatgattcattaagcctggatcctgatagttaatggaaacttaaagagtttactaaacgctttcttggyaaagcctagctttaaaaacaacattgtcttatgaaggacaaaacaaaacaaaacagaaaccaaaaaacctgatagggcagtcagtgctagatgatgaccc

SEQ ID NO: 18416 - DNA, 201 bp, Homo sapiens
tcctacatttgatgagttttgatcattgtacccaccatgtaaataccacccaaatcaagatgtagaacatttccatctcctccctaaaatagaattttttwaaatttttttcaattttttattgtggtaaaatatgcatagcataaaattgcctattttaaccatttttaaaggtacagtttagtgatactaaatatattc

SEQ ID NO: 18417 - DNA, 201 bp, Homo sapiens
ctacgccaggtctggccagcacggtgcccagacattgcattccatggggtttgctcaagggaggtaaaagctttatttgttctacagagtcaccacccaamagttgccaagcccctttggaatgttttggagggcagtttcccaagataggcatcaataattacacatatttttcagcctctttgagcaaagtcatatagg

SEQ ID NO: 18418 - DNA, 201 bp, Homo sapiens
tggaatgttaagactcaaggatgctgagggctggggacagcctgctgaaatcttaattatgaccagcagagggagccctagttactacagccagcctccaraatttaacaactagtcaacgccagactcaggaacctagtgatttcaacgtgcaacccgggaggcggagcttgcagtgagccgagatcgcgccactgcact

SEQ ID NO: 18419 - DNA, 201 bp, Homo sapiens
ctaaaataaatggaaaaggaaataccaaacagcataaatcaataaaacagaaaatagaaaaacaaaatagtaattcaatgtaactaaaagtgggttctttyggaacatgaataacattgataagtctctagccagactgatcagcaaaaaataagaaagacacaaattactaatatcaggaataagagaccctatagctat

SEQ ID NO: 18420 - DNA, 201 bp, Homo sapiens
tgctaaacaatggggtttggagaggttccaggttggggaagacattgaggtgctgagagggtggcatgcttagagaggagatggaaaccccacaccacccytgccccctgccataccttgccctgtgtatctctcccacttggctcttccagagttatatccttcataacaaaccaggaatggtaagtaaactgtttttct

SEQ ID NO: 18421 - DNA, 201 bp, Homo sapiens
agtcccagctacttgggaggctgaagcagaagcaaggtgagaacccgggaggtggagcttgcagtgagctgagatcgagccactgcactccagcctgggcracagaacaagactccgtctcaaaaaaagaaaagaaaagagagcaccatgtttggtcaagcaaaaaggacgggttacaaaacagcttctgtgtatgatgcg

SEQ ID NO: 18422 - DNA, 201 bp, Homo sapiens
cttcaatgggctgccacttttgtgtatttgtttttctttcttatagataatgagttcctttaaggctagaaactgtgtcttattcatttttaatccttccstcttccccaccattatcatctgaaataaatgaatgaatgaaaagattctgagcaaggtaatgcctggtagcaggatcaggtctaactcctcactcttcca

SEQ ID NO: 18423 - DNA, 201 bp, Homo sapiens
gcaactccatcattctcacagactgccttggatgatctgtgcctctgagtttcatggaataaacctgcagttttagtatgcctcagaagatgtaatcaagrcggttcaatctggaacaaaattaagtaatattacttatatagtcagactttctggccattctgtcgtaaatgtgctttctctattaaaaaaattaaaagt

SEQ ID NO: 18424 - DNA, 201 bp, Homo sapiens
gacattcctgagcattgtgctcagtgccttgcctcttgtcccgactttacagatgagaaaactgagactcggaggggcaaaacactaataacagtaatgcragtccacatgcatctggtggcaatctgatgaagatgtgatttatagtttctatttttttaattagaatgaatatttacacaccaaataaatacatgctgg

SEQ ID NO: 18425 - DNA, 201 bp, Homo sapiens
atcaaaaaaaatagccaggcacggtggcacacacctgtagtcccagctattcagaaggctgaggtgagaggatggtttgagcccaggaggcagaagttgcrgtgagccaagattgggccattgcactctaacctgggtaatagagccagaccctgtctcaaaaaaaaaaaaaaaaaaaaaaaaaaggttgacaacttagat

SEQ ID NO: 18426 - DNA, 201 bp, Homo sapiens
gaggccgggcgcggtggctcacgcctgtaatcctagcattttgggaggccaaggcgggtggatcacgaggtcaggagatcgaaaccatcctggctaacacrgtgaaaccccatctctactaaaaatacaagaaaattagccgggcatggtggcacacgcctgtagtcccagctactcaggaggctgaggcaggagactcac

SEQ ID NO: 18427 - DNA, 201 bp, Homo sapiens
atgcccctaattttcagacagttaaaaagcaagagtgaccccgatggacctggtggtccaaagttggacaggatttgaccacgatgcggttcttgaggtargaagccctgcctggttgtggacccgtgccctcctctgcccaggtgaacagcaacaacgaccgaggtgtggtgcaaggacagtggcagggcaagtacggcg

SEQ ID NO: 18428 - DNA, 201 bp, Homo sapiens
gcagatgctgcctctcccatcccctccattgggcagtgggtgagctacctctcagaggtacggcaagctgggaccataatcacgtattcaccaagaattcrgccaagggaatttgtgcctgggcaggaagttgtgagggagatggtctctgagatttgaggataatgatgataatggcagttctgactcatcccacctcct

SEQ ID NO: 18429 - DNA, 201 bp, Homo sapiens
gaaactccatctctactaaaagtaaatttaaaaaaaaaattagctgagcatggtggcgggtgcctgtagtcccagctacttgggaggctgaagcagaagcraggtgagaacccgggaggtggagcttgcagtgagctgagatcgagccactgcactccagcctgggcaacagaacaagactccgtctcaaaaaaagaaaag

SEQ ID NO: 18430 - DNA, 201 bp, Homo sapiens
aacaattggtgctgagaaaactatatccaaatgcaaaagaatgaagttggactcttacctaataacatatacaaaacaaattcaaaatggaccaaagaacyaaatctaagagctaaaactataaaatccttagacgaaaacagagggcaaatatttcatgacattggatttggtaatgccaccaaaagcacaagcaataaa

SEQ ID NO: 18431 - DNA, 201 bp, Homo sapiens
ccatttggcaatgtactggagcttccagtgaaataaagtaagaaacagaaattaaaagggtaaggattgaaaaagaacaactaaaattgtctttattcacygtcgatatgattatgtacaattatagaaaaatccaaaagtatctaaggatagttagtaggattaataagtgaatttagtaaaattactggatataaggtt

SEQ ID NO: 18432 - DNA, 201 bp, Homo sapiens
tagtcccagcttctcgggagcctgaggcaggagaatggcatgaacccgggaggcggagcttgcagtgagcagaaattgtgccactgcactccagcctgggygacagagtgagactccgtctcaaaaaaaaaaaaaaaaaaaaatccctgttcgtagagctcatcactgtggacccagcaccaggctacgtacctgatgaat

SEQ ID NO: 18433 - DNA, 201 bp, Homo sapiens
tactaaatatattcatgttgttgtgcaaccatcaccatcattcatctcaaaaactcttttcatcatgcaaaaataaaattctatactcattaaacaataaytctccattccccttttccctgaacccctggaatttaccattttactttctgtctctataaatttgactattctaagtacctcatataactgaaatcaccc

SEQ ID NO: 18434 - DNA, 201 bp, Homo sapiens
atgaagcacagtaaaataaggtatgcctgtctttgtccattctttcactaataccacactgtcttgatgactgtacctttatagtaaatcttaaaggtacytgaagtcaggtagtgccagtcctctaactttgttcctctccttcaataatgtacaattgtacaattgtactgactactctgggtcttttgcctcttgaca

SEQ ID NO: 18435 - DNA, 201 bp, Homo sapiens
ctttgggaggccaaggtgggcagatcatctgaggtcaggagttcaagactagcctggccaacatggcgaaaccccatttctactaaaaatacaaaaattarctgggcgtggtggtggttgcctgtagtcccagctgttcaggaggctgaagcaagataattgcttgctgtcaggaggcggaggttgcagtgagcagagatt

SEQ ID NO: 18436 - DNA, 201 bp, Homo sapiens
cgtgggactgctgagatggctgggtctgtgttcccactcggcctctcatgtcccaacaggccagcccatgcttttctgaatagcagcaacattcccagaargtgagagatgaagctgtgaggtttctagaggcctggctcagaatgtgcaccatgtcacttctgccacattctattggtcaaagcaattcatgagcccaat

SEQ ID NO: 18437 - DNA, 201 bp, Homo sapiens
cagtggtgtgattttggctcactgcaacctccgcctcccgggttcaagtgattctcctgcctcagcctctcgagtagctgggattacgggcacacacgacyacacctagttaatttttgtatttttagtaaagacagggtttcaccatgttggccaggatggtcttgatctcctgacctcgtgatccacctgcctcggcct

SEQ ID NO: 18438 - DNA, 201 bp, Homo sapiens
tgcaattacaggatgattttgtgtctcgtgggtgtcgctgctagggtggagggccacgcctcctcttttgaattctgactttcctgcctaggagtgtcccraggttttccttgttaaaattggtctggctggctgctgtgacgcgccacactgtcctgacggtgcacacactgctgtgtggaggaacagaggagtccagct

SEQ ID NO: 18439 - DNA, 201 bp, Homo sapiens
tgggagaatcacttgagcccaggagatccaggctacaatgagctatgattcattaagcctggatcctgatagttaatggaaacttaaagagtttactaaaygctttcttggcaaagcctagctttaaaaacaacattgtcttatgaaggacaaaacaaaacaaaacagaaaccaaaaaacctgatagggcagtcagtgcta

SEQ ID NO: 18440 - DNA, 201 bp, Homo sapiens
attttcatcaccctaaacaggcaccttatacccataaagcaactcctcctcattcctcacctccaacccagcccttggcaaccatcggctttccgtatcaytttacctattctgggcatctcatataaaaggaatcagacaatatatgactttttgtctgtcttctttcacttcgtataatgttttcaaggtttagtacaa

SEQ ID NO: 18441 - DNA, 201 bp, Homo sapiens
gctcatttactcaccttgctggtggttgacgctggctgttggctgagccctaagctgtggctgtcagctagaacacctacccatgacccctccacatggcytgggcttcctcacaacatggtagctgggttgcaaggccaagcatatccagagagaaggagcaccagaggaaagccatctcgcctttatggccttgtgttg

SEQ ID NO: 18442 - DNA, 201 bp, Homo sapiens
gaccatcctggctaacacggtgaaaccccatctctactaaaaatacagaaaattagccgggcatggtggtggacacctgtagtcccagcttctcgggagcytgaggcaggagaatggcatgaacccgggaggcggagcttgcagtgagcagaaattgtgccactgcactccagcctgggcgacagagtgagactccgtctc

SEQ ID NO: 18443 - DNA, 201 bp, Homo sapiens
aggagaatcgcttgaacccaggaggcgaagggtgcagtgagccaagattgcgccattgcactccagcctgggcaacaagagcgaaactccatctcaaaaamagaaaaaggcgcgtattactccattttttggaatggtataaattgaagagaaagaatagaattgcctaaataaatttaaaaaagtaaataaggttataat

SEQ ID NO: 18444 - DNA, 201 bp, Homo sapiens
tgacctgctgaaggtcacacagccagtttggcccagagataacagaacccaggactctactgccaggctatgatgctcacttctaaactgagtatgggccrggtgcagtggctctcacttgtaatctcgcactttgggaggctgaggtgggcagatcacctgaggtcaggagtttgagaccagcctggccaacatggcgaa

SEQ ID NO: 18445 - DNA, 201 bp, Homo sapiens
tgagaaaactatatccaaatgcaaaagaatgaagttggactcttacctaataacatatacaaaacaaattcaaaatggaccaaagaactaaatctaagagytaaaactataaaatccttagacgaaaacagagggcaaatatttcatgacattggatttggtaatgccaccaaaagcacaagcaataaaagaaaaaataga

SEQ ID NO: 18446 - DNA, 201 bp, Homo sapiens
aagcaaatgataacttaagccttaaaataatgatagttattggccaggcatggtggctcatgcctgtaatcccagcactttgagatgccaaggtgggcggrtcacctgaggataggagttccagaccagcctgaccaacatggagaaatcccatctccactaaaaatacaaaattagccgggagtggtggcacatgcctgt

SEQ ID NO: 18447 - DNA, 201 bp, Homo sapiens
gtgggtacacatattttgatacatgtatagaatgtgtaacaatcgaatcagggtaattgggatatccatcaccttatacatttatctgtatcttttcttcrtgttcgaaactatacaatttattctagctatttagaaaggtaccataaatcattattaactataatttccctactgtgttatgaaatattagaacttatt

SEQ ID NO: 18448 - DNA, 201 bp, Homo sapiens
acaaagccacagacttttgttgggccagggaaggggcagtgattcagctcacagaatgtggaggggacctgggacccactacttcataaataagctctcakccaattcttattttcttacacaaacccctccatcccaagctccatctacagaggtatctgtcaaattccagagcttttcagcttgctgcaaaggaagatt

SEQ ID NO: 18449 - DNA, 201 bp, Homo sapiens
tataataaagatataattaagattttttaaatgaatgatgttgggtcagttgaatatccacagaaaaaattaaaatccggctgggcacagtggctcacgcytgtaatcccagcactttgggaggccaaggtggacaaatcacctggggcaaggagttcgagaccagcctggccaacgtggtgaaaccccgtctctacaaaa

SEQ ID NO: 18450 - DNA, 201 bp, Homo sapiens
atctaatagctgattggacaaaggagagatgaactctggtggcagggccgaggcaggaacatctcagaagacaatcacaggcaccccaaccaggaggggcyttaggaaaagcacaaggcaggaaagagatatgtgcgacgtcggggcaggaggttgtggaggtagagtctgatgcagccagtgcaaagagtaactgagctg

SEQ ID NO: 18451 - DNA, 201 bp, Homo sapiens
tggtgctggggagcagatgggaggacagagagacctgaatccctcaagacatcctcatcaaggaggctgtggtgggaaggaaacaagccactgcagtgtgmggctcgtggacggacagacagagggacagatgatggacatgcccaggagctccaagcagtcaagacccctggagactatggcaatcaggcttcctggaag

SEQ ID NO: 18452 - DNA, 201 bp, Homo sapiens
aaattataatgtgctgaaagcactaacaagggggttgttattattacccaactgttgtcaccagcaatggcttcttcacaagcataaggcttcatgaactytcagagaggatggcctcaaggtgatctatgaatcccaaacttctgtgagttgtgaacgtcctcacaattttcacctttctctgagaactattgattctgt

SEQ ID NO: 18453 - DNA, 201 bp, Homo sapiens
agtaaaataaggtatgcctgtctttgtccattctttcactaataccacactgtcttgatgactgtacctttatagtaaatcttaaaggtacctgaagtcargtagtgccagtcctctaactttgttcctctccttcaataatgtacaattgtacaattgtactgactactctgggtcttttgcctcttgacataaactttt

SEQ ID NO: 18454 - DNA, 201 bp, Homo sapiens
cacctaatatgccctgggcccttaaccaggttctagcaacccagggagggggagactcagccttcgccttcatggagctctcagtccagtgagggagagaygtatgtaagcaaacaactataacacagcatccctgatcacagataagggacagaagcctccgtcttaaaagaatttgagctgagcacatggaaggggtga

SEQ ID NO: 18455 - DNA, 201 bp, Homo sapiens
ctctgcctctttagatgcctgcagaacagagtggagctgtgggcccaggagtcttctgctctcacccaggaggggagagggagccacagactgacccggcwctgcagcgtgcaaccatgtacttcggggtcctggcgctgagcctgttttttctcatttgagggttgttgtgagggctaagaatggccaaccataaatccg

SEQ ID NO: 18456 - DNA, 201 bp, Homo sapiens
tgagctttcaaggttttgctgttgttaacttctctctgattcttccgaagtccttcttgccgtactggtgaggcttcaggaactgactgcaggtgttcacsccaatatctatgccgggaagcccttttactcctctgttctgcaaagctctcagtaaggcatttttgtgttttagggggcggcattcatgtctggctttct

SEQ ID NO: 18457 - DNA, 201 bp, Homo sapiens
ataatcaggtgagccctttgaaagcaaagagttttctctgtctggttgcagaagaggaaatcagagagacctgcttcagctggcctggaagaaagcctgtrtgagccacttggcaagtgactatgggtagcttctaggacctgagagcagtccttagctgacagctagcaaaaaaacaaagacctcagtcctagaacttcc

SEQ ID NO: 18458 - DNA, 201 bp, Homo sapiens
tttgacttaaagtgagagacatgtaactctcattaacttgaacacctagaggccattgtaggtttattaattggcctaatttcaatattattgtgtatccrggaataggaaggcccaaggacagggagagagatagggaaatggccagtcggtggagcagtcagaactcacatgacattttttaattaagttcaacatctt

SEQ ID NO: 18459 - DNA, 201 bp, Homo sapiens
atgttagaaattttctttagatgtctggcaaatcttttctgctgatatttaaaagtaggggctaaaaaaactgattgggactgggtgtggtggctcacgcytataattccaatgccttgggaagctgaggcaggattgcttgaggctaaatttaagaccagcctggcaacatagtgggacccccatctttacaaaaaattt

SEQ ID NO: 18460 - DNA, 201 bp, Homo sapiens
ggtattaaggtcagtgggtgggtatctgagattccaaaattgcacaaagctatatttctcctatttgatactctcaattcctcaagacctcagagagcagytggagcacagagaattaacatgagtgacaatcccaaacagcagagcatcacagccctgaggacagtgaaagtcctgaactcaaggctcccaagtccaagt

SEQ ID NO: 18461 - DNA, 201 bp, Homo sapiens
cggatcatgaggtcaggagatcgagaccatcctggctaacacggtgaaaccccatctctactaaaaatacagaaaattagccgggcatggtggtggacacytgtagtcccagcttctcgggagcctgaggcaggagaatggcatgaacccgggaggcggagcttgcagtgagcagaaattgtgccactgcactccagcctg

SEQ ID NO: 18462 - DNA, 201 bp, Homo sapiens
ggaggctgaggcaggagaatcgtttgaaccggggagacagaggttgcagtgagtcgagatcgcaccaccgcactccagcctggggaacaagagtgaaacaycatctcaaaaaaaaaaaaaaatgtattgcaaaaggcattggaggccaccataaagagtttgaacttaggaccttgttgggagtgagaagccacagggcct

SEQ ID NO: 18463 - DNA, 201 bp, Homo sapiens
cataaggtgggcaaggacaaggtctgctgatgacagtactagagcatcttgccttccaactgggtgagcacctccctgcaagagcatgaacgccagctgcytatcacctatgtcaccggctacaggcatggtcctaaggatgaggtgatgtagaggtgagttagagcttcacagtcttttattagttgcccgatgactttg

SEQ ID NO: 18464 - DNA, 201 bp, Homo sapiens
cattaatctcattgtacacctccatcagagttcttgagtgactaggtgcattgtcaatgagcagtaatactttgacaagaatcttcttttctgatcagtargtctcaacagttggcctaaaatattcagtaaaccatgctataaacagatgtgctatcatcctggcttcgttgttcctttatggaccacaggcatagtaga

SEQ ID NO: 18465 - DNA, 201 bp, Homo sapiens
agctaacacagtgaaaccccatctctactaaaaatacaaaaaaattagccgggcgtggcggcatgcgcctgtagtcccagctactcaggaggctgaggcargagaaaggcgtgaacccaggaggcagagcttgcagtgagccgagatcgcgccactgcactccagcctgggcaacagagagagactcttgtctaaaaaaac

SEQ ID NO: 18466 - DNA, 201 bp, Homo sapiens
accatcctggctaacacggtgaaaccccatctctactaaaaatacaagaaaattagccgggcatggtggcacacgcctgtagtcccagctactcaggaggmtgaggcaggagactcacttgaacccaggaagcggaggttaaaggattttttcgtgatccttgaacacatagcacttcgtggatgatttattaaatgtatc

SEQ ID NO: 18467 - DNA, 201 bp, Homo sapiens
acccacctctccgtgggaggcatgacaactttaacctatcacaggcctcaggctatggtgtttcctcccaaaaggtgtctgcagggcccaccacctccctytaccacatgcaggtattaaggtcagtgggtgggtatctgagattccaaaattgcacaaagctatatttctcctatttgatactctcaattcctcaagacc

SEQ ID NO: 18468 - DNA, 201 bp, Homo sapiens
agaggttgcagtgagtcgagatcgcaccaccgcactccagcctggggaacaagagtgaaacaccatctcaaaaaaaaaaaaaaatgtattgcaaaaggcaytggaggccaccataaagagtttgaacttaggaccttgttgggagtgagaagccacagggcctttggaatgaggagtgccacagaataaaaatggtggttt

SEQ ID NO: 18469 - DNA, 201 bp, Homo sapiens
cttggatagctgtggctggaatgttaagactcaaggatgctgagggctggggacagcctgctgaaatcttaattatgaccagcagagggagccctagttaytacagccagcctccagaatttaacaactagtcaacgccagactcaggaacctagtgatttcaacgtgcaacccgggaggcggagcttgcagtgagccgag

SEQ ID NO: 18470 - DNA, 201 bp, Homo sapiens
accccaaccaggaggggccttaggaaaagcacaaggcaggaaagagatatgtgcgacgtcggggcaggaggttgtggaggtagagtctgatgcagccagtrcaaagagtaactgagctgtgagggggtggggggtgagctggaggagtggaaagcaatgggatcctgcctagttccttgtccaagatgaaggagcttggac

SEQ ID NO: 18471 - DNA, 201 bp, Homo sapiens
tggccagtgcttcagactgaaggaccagccttctgtttgtttgtttgtttttgagagggagtctcgctctgtcgcccaggctggagtgcagtggcgcgatmtctgctcactacgagctccacttcccaggttcacgccattctcctgcctcagcctcccgagtagctgggactgcaggtgctcaccactgcgcccggctaa

SEQ ID NO: 18472 - DNA, 201 bp, Homo sapiens
aatgagcatgaagaagtatttgctgaatgagttttgacaggaattaatgaatgcagaatggaagaaatgaatgaagaggggatcataagtgaggtgattcytgagcatccaaagcagtgacacagtgagatctgaagtctttgcagcttcagagccgctcgtaggtgctaacaatgtgtgatgtatggaaagacagacgag

SEQ ID NO: 18473 - DNA, 201 bp, Homo sapiens
ttcaagtcccagctccctcacttaccacataagctgtgtgattgaggagttactttacttccctgtgtctcggcttccttgtctgttaaatgtgggtgatrataatacctctgtagtacctcctagagaaaaaaaatatagcaccaagtgctatagtacacatagcaaatctgcaaaagtgctagctatcattattatctg

SEQ ID NO: 18474 - DNA, 201 bp, Homo sapiens
tactcgggaggctgagtcaggagaatcgcttgaacccaggaggcgaagggtgcagtgagccaagattgcgccattgcactccagcctgggcaacaagagcraaactccatctcaaaaaaagaaaaaggcgcgtattactccattttttggaatggtataaattgaagagaaagaatagaattgcctaaataaatttaaaaa

SEQ ID NO: 18475 - DNA, 201 bp, Homo sapiens
tgctgttttggttactgatagccttgtagtatagattgatgttgagtaatgtgatgcctctggctttgttctttttgcttaggattgctttggctattcargctgtttgggctccatatgaattttagaatagtttttctaattctgtaaaaaaatattatcagaagtttgatagaaatagcattgaatctgtacattgct

SEQ ID NO: 18476 - DNA, 201 bp, Homo sapiens
aagttaggtcagggatctgagctttcacataccagaggggcctccaaacctttagaacagaggttggcaaacttttctgccaatgaccagatagtaaatayttcaggctttgcaggccatagagtctctgttacaactactcaactctgctgctatagcatgaaaactgccatacttagtgcataaacaaatgagcctgga

SEQ ID NO: 18477 - DNA, 201 bp, Homo sapiens
catccactgaaaaaatagcatcctgttctggcctgtccctacatacattgcttgggaagtagcaacatgaattgtgggctacaaatccagtgtgtcctcargcaagaagtccctttcttcccatttctgggtctcagcttatatgtcagtaaatggagacctgagctcctaatggctcttccagctctgctgatattagac

SEQ ID NO: 18478 - DNA, 201 bp, Homo sapiens
gatcacgaggtcaggagattgagaccatcctggccatggtgaaactccatctctactaaaagtaaatttaaaaaaaaaattagctgagcatggtggcgggygcctgtagtcccagctacttgggaggctgaagcagaagcaaggtgagaacccgggaggtggagcttgcagtgagctgagatcgagccactgcactccagc

SEQ ID NO: 18479 - DNA, 201 bp, Homo sapiens
ataaaatgaataaattccttgaaagacacaaactatcaaaacccattgaggaagaaatagatatccaaagtatccctatatctattttaaaatttgagttyggagtgaagttcagtagaaaactctccagccgagcctaacacaaattgctggccatagaactggttgtcgtcttgtcaccacattttcatgtggtttgtt

SEQ ID NO: 18480 - DNA, 201 bp, Homo sapiens
gctctgtcactctgtgagaatctgcattcatagcccaatccttatggagcgactgaccagggatccctcctctcatcatgcgggttcctttctcctattaygcatctgccacaagtgaaaggaacactgtaagcatcttccctggaacaggaggccatctgccactccacgtataaagatgctccttcccgcagggaggct

SEQ ID NO: 18481 - DNA, 201 bp, Homo sapiens
caagactctatctcaaaataaataaataaataaaaattaaaaaataaagattaggagagacagtgaagaaaacacaacacagagacacagagagccttgtrtccttgttccccaggggagcgtgccaggagcccttcccgagctggcctccagctcagaccatctctttgctccccttggcctctcctcttttttggttct

SEQ ID NO: 18482 - DNA, 201 bp, Homo sapiens
ggaaatccaattcccccttacccagagtttgcagtttttttgttttgtttatggcttttgattttttttcttatagaccgtctctgtgctgaaaatcagcytaaggcataaatttaaggttgtatcgggtctttgctgagcctgccccttttgggagcatgtgcagtcgttttttaatttcctccatgaatacagttgctt

SEQ ID NO: 18483 - DNA, 201 bp, Homo sapiens
cctcagatccagggccacacagccaacaagtagatgattcaggatgtcatgaattggcagagcacaggaatggcagctaggaggtcttgtgtaaatagtartgatgataccactcacatttcctgagaacctagtatgtgcctggtaccagtctaaatactctatgtgaattatttcacttaatcctcccaacgtgaggaa

SEQ ID NO: 18484 - DNA, 201 bp, Homo sapiens
tccatggatccagagacgtttctgggcatagttgggaattgtggcctgcgtgggaaggagtgagaggcccccattggctgcatcctcgcctgattcccacyccaagcacttgagggcaagagcagctctggctcaagtgaaaacagctatatgaccttgagcaagaaaatttgcccttggtacctctgttttctgatctgt

SEQ ID NO: 18485 - DNA, 201 bp, Homo sapiens
agtcaaatatctctacaaggttggcatggaaaacatcacccatccacttttttttcctccagttgccccctctccagtagctacttctttccctttctacrggaggcagaattctaagatgctcaccatgagggttaatatcatgtggcaacttgactggaccatggagttctcagatatttggtcaaatattgttctagg

SEQ ID NO: 18486 - DNA, 201 bp, Homo sapiens
gtacctgctgcacccttctcctcacatcctctcggcacctgtaggaggggggccagcttcctaacccatgacccaactcagtgggcaggtttgttctagcytcttgacattagctacgccaggtctggccagcacggtgcccagacattgcattccatggggtttgctcaagggaggtaaaagctttatttgttctacaga

SEQ ID NO: 18487 - DNA, 201 bp, Homo sapiens
tattttaaccatttttaaaggtacagtttagtgatactaaatatattcatgttgttgtgcaaccatcaccatcattcatctcaaaaactcttttcatcatkcaaaaataaaattctatactcattaaacaataattctccattccccttttccctgaacccctggaatttaccattttactttctgtctctataaatttga

SEQ ID NO: 18488 - DNA, 201 bp, Homo sapiens
atatccctggtcactgggtgaagacagcctgtccttgagccagggatctgcgctcaccttcctttccctttgagacacttgggtagaaatatttgagaagyatggtgacccccctggattttttagctctgtcactctgtgagaatctgcattcatagcccaatccttatggagcgactgaccagggatccctcctctcat

SEQ ID NO: 18489 - DNA, 201 bp, Homo sapiens
tgtgttctgggggcatatattgcataatttctattattttaaacttgttaatgtgtcatttatgccacagaatgtgatcctttttggtgagtgctccgtgkaagattgagaagaatgcgtatcctgctgttgttggatgaaatattctgcagatgtcagttagcccagctgagtgacggtgctattgagaaccattgttct

SEQ ID NO: 18490 - DNA, 201 bp, Homo sapiens
atccttatgcaggtttttgtgtgggcttgagtttttaattttttttttttattttttgagacagagtctcgctccgtcaccaggctagagtgcagtggtgygattttggctcactgcaacctccgcctcccgggttcaagtgattctcctgcctcagcctctcgagtagctgggattacgggcacacacgactacacctag

SEQ ID NO: 18491 - DNA, 201 bp, Homo sapiens
cagttcacaatttacatgcaggcgcagagctgtttgatcagggtattcagtggtccctgacatggtctagacagaagatggggtcacaggctccatgtggrcatggcccattgtccccacaggctcctgaccctatagggaaggatatggtgtatggcccaggtctaagtacaagtcaaatatctctacaaggttggcatg

SEQ ID NO: 18492 - DNA, 201 bp, Homo sapiens
gagagggcctgggagcaaaccagaaagagcacattgaacctaaaagaaagaatatatagtagtcagaaaaaaaaaaaaaacaaatatggtccaggcatggyggctcacacctgtaatcccagcactttaggaggccaaggcgagaggatcatgaggtcaaaagatcgagaccatcctggcgaacatggtgaaaccccatct

SEQ ID NO: 18493 - DNA, 201 bp, Homo sapiens
ctgagcctcagtttctccacagtcccattcgcaactccgtgtttccaaggtctcttggcaggagccactcccacagtgaacccctctaggtgcaattacargatgattttgtgtctcgtgggtgtcgctgctagggtggagggccacgcctcctcttttgaattctgactttcctgcctaggagtgtcccaaggttttcct

SEQ ID NO: 18494 - DNA, 201 bp, Homo sapiens
tttcctttggagctgacggaatcgtgagcactgtttcctcctggctgcggcatcatggtggagcacgtgggcaggtggaggtgggtgggccagcgtctcarcatccagtagacaaatgtcccttgaataccccattttcagcatagaccctagacctcagctgagcttgttgtgcttcagcccagagaccctctcttttac

SEQ ID NO: 18495 - DNA, 201 bp, Homo sapiens
agcctgggtgacatagcgagactccatctcaaaaaaaaaaaaaaaaaaaaaaaaaaggcaatcagttgcacttagcagtggctagctcaataacaccctartattggctctttctctaggaaagccctccttaataaagtgtctacatcttcacttgagcctctgctttcttgggatgcagactacaacaaaatgaaacaa

SEQ ID NO: 18496 - DNA, 201 bp, Homo sapiens
aactaaaattcatagttaatattagggttcactctgtgttgtgcattctatggcttttgacaaatgtataatgacatgtatctaacattccactgtcatayagaatagtttcacccctccaatatccccatgttccagctatgtgctccacctattcatccctccttcccttgcctgaacccccagtgaccactgatcttt

SEQ ID NO: 18497 - DNA, 201 bp, Homo sapiens
tttaacagatctttaaataaatatatggtgacctatgttttcttttaggtagttatcagcttattgctattaaaaataacactaaacttttgtttatctamagagtgtcaggtaagcaagtgaacattttgatgcaaaaagaaatcactttttttcctctggattttggacttttgttagactgtatcacaaaagtgaaat

SEQ ID NO: 18498 - DNA, 201 bp, Homo sapiens
gattcatgactctgactgttggctgtggtctcctacttgagcacataggatagaagaacatgatttctggaagtagcttgttcagcatcttcatgccatgrtggacttgggggtattctgggggggtgctgctgagcctgtgtgaggccaagtattcatgaagagcaacaaagagacttgggataaattaagatggtactg

SEQ ID NO: 18499 - DNA, 201 bp, Homo sapiens
ctctggaaaattccactgtacattcagggctagggagatgctttgagtcctgaaaaaaatcatggtgcccttccaatccatataattaaaacaaaagtaarcttgaaattaagtaaacacaacacagtttttattttcccaaggtgagtcctttgattttttttttttaatgttaaaatattttttaaaattcaggccagg

SEQ ID NO: 18500 - DNA, 201 bp, Homo sapiens
cagcagtatacaagtgtcccctttctctacaaactcaccagcatctgttatttttttgactttttactaatagccattctgcctggtatgagatggtatckcattgtggttttgatttgcatttctccaataattaatgatgttgagaagtttttcataggtttgttggccccatatatgtcctcttttgaaatgtgtctg

SEQ ID NO: 18501 - DNA, 201 bp, Homo sapiens
tcagttcaagtctaaaggcaggggaaagctgagtttgaaggcagtgaggcaggaggaattccctcttacacagaagaaagtcagcctattgtcccattcargccttcagttgattggattaggcccacccacatcagggagggcaatctgctttactcaaagtctaccaatttaaatgttaatctcatccaagaaaccctc

SEQ ID NO: 18502 - DNA, 201 bp, Homo sapiens
gggaggcggaggttgcagtgagccaggatcgcacactgcactccaccctcagcaacaagtgcgaaactcctcaaaaaaaaaaaaaaaaaaaaaaaaaaaamaaaaaaccatggccacaggagaaattaacatcctgttacatgataacagtgatgacaatcactgttactgagcgctggctgtgggctggccattttcaca

SEQ ID NO: 18503 - DNA, 201 bp, Homo sapiens
ggagagcttgagaacaacgagtgatcttagattttaacaggatccttctggcttccatgttgagaatgagccctgaggatatgcgggggtgggggcacagrggaagtgaaatagggaacccagtgagcatgacagcatctagaaaatgaaaggggccatagtacctcccttaggtgtatgttaggaggcataagcacttga

SEQ ID NO: 18504 - DNA, 201 bp, Homo sapiens
ctgaaggacccacttgccagatggctcagtcccatggcttccaaataattctgtctgtcagctgggagctcagtgggctgtgggttggaagccttggttcrtctccaggtgagcttctccgtgggccatttgggtttcttcatggcatggtggctgggttctaagagcaagcaacccaagggaaccagaaagaagctgtat

SEQ ID NO: 18505 - DNA, 201 bp, Homo sapiens
tacatgcaggcgcagagctgtttgatcagggtattcagtggtccctgacatggtctagacagaagatggggtcacaggctccatgtggacatggcccattktccccacaggctcctgaccctatagggaaggatatggtgtatggcccaggtctaagtacaagtcaaatatctctacaaggttggcatggaaaacatcacc

SEQ ID NO: 18506 - DNA, 201 bp, Homo sapiens
ttgcagacattggtacacttccttctgaatacttcagcatgcctatggttaactagagtttgaaatttgtttacagtttttttcttggtgttaaattcacrtataatgagatgtacaaatctaaagtgtacatttgctgcattttaataaatgcctatgtaatcaatattccaatcaaaatatagaaaaaatgatcactcc

SEQ ID NO: 18507 - DNA, 201 bp, Homo sapiens
gttgctgcaaaggacataatctcattcttttttatggctgtatagtatcccatggtgtatatgtaccacattttctttatccggtctactgttgatgggcrttaaggttggttgcatgtctttgctattgtgaatagtgctgcaataaacatacacgtgcatgtgtctttatggtagatttatattcctttgggtatatat

SEQ ID NO: 18508 - DNA, 201 bp, Homo sapiens
aattacacatatttttcagcctctttgagcaaagtcatataggattatatatctgaaattttggtgtaaattataatgtgctgaaagcactaacaaggggrttgttattattacccaactgttgtcaccagcaatggcttcttcacaagcataaggcttcatgaactctcagagaggatggcctcaaggtgatctatgaat

SEQ ID NO: 18509 - DNA, 201 bp, Homo sapiens
tcacattttgggaggtcaagacaggtggatcacttgaggtcaggagttcgagaccagcctggccaacatggtgaaaccccatctctactagaaataataawaaaaaaaaaatagccaggtgtggtgatgcatgcctgtaatcccagatactcaggaggctgaggcaggagcatcacttgaacctgggaggcagaggttgca

SEQ ID NO: 18510 - DNA, 201 bp, Homo sapiens
tgaggcctttttaatctccagacaagggctaaaccccatttccataacctcagagctgacttggatagatgagagggtggtatggtggtgcacttgcattyacatttcttcttctttgttttttgctttttttttatttttatttttttttttgagacagggtctcactctgttgcccaggtagggagtgcagtcacgtga

SEQ ID NO: 18511 - DNA, 201 bp, Homo sapiens
aaactccatctctactaaaagtaaatttaaaaaaaaaattagctgagcatggtggcgggtgcctgtagtcccagctacttgggaggctgaagcagaagcawggtgagaacccgggaggtggagcttgcagtgagctgagatcgagccactgcactccagcctgggcaacagaacaagactccgtctcaaaaaaagaaaaga

SEQ ID NO: 18512 - DNA, 201 bp, Homo sapiens
ggaaatgacctaaattcttataaatttaagaagggttagtaaaattatgtaaattcacacaagagatgacattaataatgacagtgcatagctatattctrtgatttgaaaagctgtcatctcagcactttgggaggccaaggcgggtggatcacgaggtcaggagattgagaccatcctggccatggtgaaactccatct

SEQ ID NO: 18513 - DNA, 201 bp, Homo sapiens
tcaaactgctttccagaatggctgagctaatttacattcccaccagcagtatacaagtgtcccctttctctacaaactcaccagcatctgttatttttttkactttttactaatagccattctgcctggtatgagatggtatctcattgtggttttgatttgcatttctccaataattaatgatgttgagaagtttttcat

SEQ ID NO: 18514 - DNA, 201 bp, Homo sapiens
atgtctggaatgagagctggtttgcccggcaggacctaggcccctcttacaatggctggcaggttctggatgccaccccccaggaggagagtgaaggtacrctcaattgggtggggtaagttccagacccctgcttttccttacccatgctgctcatgcccacccctcctgcccaggtgtgttccggtgcggcccagcctc

SEQ ID NO: 18515 - DNA, 201 bp, Homo sapiens
accatcctggccatggtgaaactccatctctactaaaagtaaatttaaaaaaaaaattagctgagcatggtggcgggtgcctgtagtcccagctacttggraggctgaagcagaagcaaggtgagaacccgggaggtggagcttgcagtgagctgagatcgagccactgcactccagcctgggcaacagaacaagactccg

SEQ ID NO: 18516 - DNA, 201 bp, Homo sapiens
attgatgttgagtaatgtgatgcctctggctttgttctttttgcttaggattgctttggctattcaggctgtttgggctccatatgaattttagaatagtytttctaattctgtaaaaaaatattatcagaagtttgatagaaatagcattgaatctgtacattgctttgagcagtatggccactttaacaatattgattc

SEQ ID NO: 18517 - DNA, 201 bp, Homo sapiens
tgattttttgaaacttactacaaagcaacagtaatcataatagtgtggtactggcattaaagacagacatatggactcaaaggaatagaatagagagcccrgaaataaatcttcacatatatagccaaatgattttttgcaagggtgcccaaaccattctgtagggggaaaagacagtcttttcaacaattggtgctgaga

SEQ ID NO: 18518 - DNA, 201 bp, Homo sapiens
agtcttataaggtctaggcctggaaactggcacaacatcaattccaccatagtcagtggtcaaattagtcacaggccagcccagactcaagaggaaccctyttcttgagtgggacatagacccacctctccgtgggaggcatgacaactttaacctatcacaggcctcaggctatggtgtttcctcccaaaaggtgtctgc

SEQ ID NO: 18519 - DNA, 201 bp, Homo sapiens
ggttacaaaacagcttctgtgtatgatgcgattcatgtaaatttgttgccatgtgtatacagccgtatgcatgtatactttcttcactccctgtattgctygaattttgtacctgagtatgtattatctctatagccagaagaacaattaaattgcttttaaagcatctgattattccccaggcacagattttaatttgtg

SEQ ID NO: 18520 - DNA, 201 bp, Homo sapiens
gggaaagctgagtttgaaggcagtgaggcaggaggaattccctcttacacagaagaaagtcagcctattgtcccattcaggccttcagttgattggattargcccacccacatcagggagggcaatctgctttactcaaagtctaccaatttaaatgttaatctcatccaagaaaccctcatagaagtgtccagaataatg

SEQ ID NO: 18521 - DNA, 201 bp, Homo sapiens
tcacttttggaggccaaagtgagagaactgcttgaacctaggagtttgagaccagcttgggcaacacagcaataccccatctctacaaaaaattaaaatawaaaatacctgctgggtgtggtggcatgctcccatagtcctagctacctggaggctgaggcaggaggattgcttgagcccaagagctggaagtttgcagtg

SEQ ID NO: 18522 - DNA, 201 bp, Homo sapiens
aatcaaacaactaatgaaactttgatgtacataaaatagtcagggaagttctatgatttagtgggtgttggggccaggagctgggctcactctacctcccstcgtagtaaacatttgtgatgtactatgtcttcctccgtataccactgttaacatcccatatcaagtgcatgccatggcatctctctgctttgctttcag

SEQ ID NO: 18523 - DNA, 201 bp, Homo sapiens
ggaaggaaaagcaggtttcagagggaaaagaagccctaaggcccagctgggaggctggagcaatcagggaggacttctcataagagctggccttgaagaaygttatgatttcctcaaattcaggcagggggagaaacatgagaaggaaagatgtgttaatgaaccagagtgacatgaggctgagaggcagatagaaaggac

SEQ ID NO: 18524 - DNA, 201 bp, Homo sapiens
ataaaatgaagcacagtaaaataaggtatgcctgtctttgtccattctttcactaataccacactgtcttgatgactgtacctttatagtaaatcttaaargtacctgaagtcaggtagtgccagtcctctaactttgttcctctccttcaataatgtacaattgtacaattgtactgactactctgggtcttttgcctct

SEQ ID NO: 18525 - DNA, 201 bp, Homo sapiens
cacatcaaacactttggggtttttatgcagtttcctgaatgttggggtgatcccagggagcggcctcatcctactgtgctcagcacacggttgtctccttrcccttccttgtctctttccctcgattctaccccctcccacttccccttcctcactggcccaggccacatccagccttcgatagccccaagtcatccatca

SEQ ID NO: 18526 - DNA, 201 bp, Homo sapiens
gctggggagcagatgggaggacagagagacctgaatccctcaagacatcctcatcaaggaggctgtggtgggaaggaaacaagccactgcagtgtgaggckcgtggacggacagacagagggacagatgatggacatgcccaggagctccaagcagtcaagacccctggagactatggcaatcaggcttcctggaaggacg

SEQ ID NO: 18527 - DNA, 201 bp, Homo sapiens
ccaaagtctttgtccagtagatcaagccttttccagaaacagtttctgctaatttattttttcctttaagtgggccatactttcatgtttctttgtgtgcrttgtaattttttgttgaaaactggacatttgaatctaacaatgtggtaactctggaaatccaattcccccttacccagagtttgcagtttttttgttttg

SEQ ID NO: 18528 - DNA, 201 bp, Homo sapiens
tgcactgggtcctggggaaggggaggtgctttggacaaggtttggacacagaacaggtcagtatggttgtggaaaaatgaatagctctgatcagtggtttycaaacacgagcgtacatcagaatcccaggagggatggcgtgctggaccccacccccagagctgccgactgagtaggtcttgggcagggcctgagaatgtg

SEQ ID NO: 18529 - DNA, 201 bp, Homo sapiens
gaatgaaccctgaataggggaagaggatgcttgggctgagactagatccaacactcaactctttcctggagacactcatccaatttaagactcagcctcarttccgccttctggaggaagccttgcttgtgccccttcagactaggccaagccctctgttagtgttctttcagctcccatccttctccctgatagcatgta

SEQ ID NO: 18530 - DNA, 201 bp, Homo sapiens
cagaatgatagggatggaagcaaagggagtccagaagagggtgaaaggaacctccacttcggccattgtggaggcttacgtgatattgtagttgggtctcyacagtgaggcaggatctgcccaggcagagggaagagcaggcagagccgcacggacgtgggaagtagggagtcttgagtctgctagaggaattctgtctgc

SEQ ID NO: 18531 - DNA, 201 bp, Homo sapiens
ccatttctgggtctcagcttatatgtcagtaaatggagacctgagctcctaatggctcttccagctctgctgatattagacttgacaattctatgtacaargtacctggttgcgggagagggtcctgcttgtgttttctgactaaaccaaggtcatctgagctcaaagttttggagtttcagaggtttgtgcctgccctag

SEQ ID NO: 18532 - DNA, 201 bp, Homo sapiens
ttggctccctggagaaagcctctcttccatcctcactccccatcaagagacccttatttctctgaactcctccccaaaggacagggtgctttagcacgacytcctcttcactggatttagggcatggtgctggggagcagatgggaggacagagagacctgaatccctcaagacatcctcatcaaggaggctgtggtggga

SEQ ID NO: 18533 - DNA, 201 bp, Homo sapiens
cctctttgagcaaagtcatataggattatatatctgaaattttggtgtaaattataatgtgctgaaagcactaacaagggggttgttattattacccaacygttgtcaccagcaatggcttcttcacaagcataaggcttcatgaactctcagagaggatggcctcaaggtgatctatgaatcccaaacttctgtgagttg

SEQ ID NO: 18534 - DNA, 201 bp, Homo sapiens
caggaacctaaacctgtatttattttccctaagggcaatgggccagttctcattaattcaacctttgcagtgattttacagaacttaatgaccaagaggcygggcaaggtgcctcacacctgtaatcccagcactgtgggaggccaaggcaggcagatcacctgaggtcaggagttcgagaccagtttgaccaacatggca

SEQ ID NO: 18535 - DNA, 201 bp, Homo sapiens
tttcagatctgctcattatttgcctgtcttccccctgcttttgagctttcaaggttttgctgttgttaacttctctctgattcttccgaagtccttcttgscgtactggtgaggcttcaggaactgactgcaggtgttcacgccaatatctatgccgggaagcccttttactcctctgttctgcaaagctctcagtaaggc

SEQ ID NO: 18536 - DNA, 201 bp, Homo sapiens
gctccttcacttctgcttctttgactcacctcccaaatcgactatatgtacccatgattatcttagggttttgcttccaaggaaacccaaactaagacacscctcaccctgccccaacatgtctcccaagacacttgaagtctcctctgtggaatgtgtgtggcagtccctaccctaagctctccttccctgtgcttctca

SEQ ID NO: 18537 - DNA, 201 bp, Homo sapiens
catccccaggaaggaaggggacattcctgagcattgtgctcagtgccttgcctcttgtcccgactttacagatgagaaaactgagactcggaggggcaaarcactaataacagtaatgcaagtccacatgcatctggtggcaatctgatgaagatgtgatttatagtttctatttttttaattagaatgaatatttacaca

SEQ ID NO: 18538 - DNA, 201 bp, Homo sapiens
ctttatcaaagttaagaacttgtcctgcaaacagcaccatcaggaaagtggaaagatagcccatggaataggagagaatatttgcaaatcatgtattgaayggataaagcactctcatctgaaatatatgtatatgtaactcttaaaactcaaccataaaaaaaaaataattttttttgagagcacctgaaagtccaaggc

SEQ ID NO: 18539 - DNA, 201 bp, Homo sapiens
tagtcatggagttcaggtgctcatgatgcgtactaagcataggattataatggggcccattaaaaaccaattatgcttagtccagagtctggaagatgccrctggcttcaacagagtttccagggctcaagcccactggcctgagacaaagaattggggaggattgtatcattcagctctctggtatcacccaagggcagg

SEQ ID NO: 18540 - DNA, 201 bp, Homo sapiens
gttaatatcatgtggcaacttgactggaccatggagttctcagatatttggtcaaatattgttctaggtgtttctgtgagggtgttttgggtgagattaayatttaaattggtagactgagtaaagcagatggccctctctaatgtgggtggcccttatccaatcaggtgaagtccagaataggacaaaaaggctgactct

SEQ ID NO: 18541 - DNA, 201 bp, Homo sapiens
aaaacaggctgtgtaactctgtacctcagttttatcatctgtgacattgagttaacagtagtacctccctcatatggtttattaagattaaatgagctaayatttataaaatatttggaaaagcacttggttcataggaagatttattaaataaaacctatccaatggtctagccaacaattactgacatttcctgtatgc

SEQ ID NO: 18542 - DNA, 201 bp, Homo sapiens
ccatgacccagggtccagcagccctcatccaatcccaaactccccttgtatccagccctggggcataccagggctgagataattaccatccagcaacctcrtcgtctgcttctgactcatccactgaaaaaatagcatcctgttctggcctgtccctacatacattgcttgggaagtagcaacatgaattgtgggctacaa

SEQ ID NO: 18543 - DNA, 201 bp, Homo sapiens
gaacatttccatctcctccctaaaatagaatttttttaaatttttttcaattttttattgtggtaaaatatgcatagcataaaattgcctattttaaccayttttaaaggtacagtttagtgatactaaatatattcatgttgttgtgcaaccatcaccatcattcatctcaaaaactcttttcatcatgcaaaaataaaa

SEQ ID NO: 18544 - DNA, 201 bp, Homo sapiens
aggactccccaataatctctcaaattttaggatgcctccagaactggatgaggttccagaatcctgtctcactagaccaggtcaagtgacacagcccagcytagaaatttgcccctctttactcccccttctctccagaactgtcgtcaaccaagatgccaacagggaatgggttgagctcctcagctgtgtgaacccagg

SEQ ID NO: 18545 - DNA, 201 bp, Homo sapiens
caatggggtttggagaggttccaggttggggaagacattgaggtgctgagagggtggcatgcttagagaggagatggaaaccccacaccacccctgccccytgccataccttgccctgtgtatctctcccacttggctcttccagagttatatccttcataacaaaccaggaatggtaagtaaactgtttttctgagttct

SEQ ID NO: 18546 - DNA, 201 bp, Homo sapiens
tctctgaactcctccccaaaggacagggtgctttagcacgacctcctcttcactggatttagggcatggtgctggggagcagatgggaggacagagagacytgaatccctcaagacatcctcatcaaggaggctgtggtgggaaggaaacaagccactgcagtgtgaggctcgtggacggacagacagagggacagatgat

SEQ ID NO: 18547 - DNA, 201 bp, Homo sapiens
ctggccaacatggtgaaaccccatctctactagaaataataaaaaaaaaaaaatagccaggtgtggtgatgcatgcctgtaatcccagatactcaggaggytgaggcaggagcatcacttgaacctgggaggcagaggttgcagtgagctgagatcacaccactgcactccagcctgggtgacatagcgagactccatctc

SEQ ID NO: 18548 - DNA, 201 bp, Homo sapiens
aagagtaacaacacctgcttattacgagtgttttgataaagttagctgaagctttcagaaaaaaaacccagaaaagcttcaccagagagtccttctccacsacaataatgttcctgctcattcctctcatcaaacaaaggcaattttgtgagagggttgactggaattcattaagcatccaccatactgtcctgatttggc

SEQ ID NO: 18549 - DNA, 201 bp, Homo sapiens
atagggaaatggccagtcggtggagcagtcagaactcacatgacattttttaattaagttcaacatcttacagggcatggtttgtggtgctaacaaacagktacaatagtagcctcaaagatcactgatcaagggctgggcacaggggctcatatatgtaatcccaatcccattcacttttggaggccaaagtgagagaac

SEQ ID NO: 18550 - DNA, 201 bp, Homo sapiens
gaaacagctcaaatacccatcaatagataaataaaatgtatatccatccaatggaatgctagtcagaaataaaaaggaacgcagtactgatacatgctacytacagtgtgaacgaaccttgaaaactgatgttaagcggaaaaatttcacaaaagaccacgtgttgtatgattccctttatatgaaatgtccaggataggc

SEQ ID NO: 18551 - DNA, 201 bp, Homo sapiens
ttggttgtgctgtgcaaaactgcaatggaagtggagtgatacgcagcaactccatcattctcacagactgccttggatgatctgtgcctctgagtttcatsgaataaacctgcagttttagtatgcctcagaagatgtaatcaaggcggttcaatctggaacaaaattaagtaatattacttatatagtcagactttctgg

SEQ ID NO: 18552 - DNA, 201 bp, Homo sapiens
ccacaaggtgaacttgatcctgaggagcctggggagccgtggattggcaggccagactcagaatggcaagaggactgacagtctgcctttctcccctcccyttcctccagcgtgcctaccctggagcctcaggagagggcctcagtccagtttgacatcaccccctccaaaagtggcccaaggcagctgcaggtggacctt

SEQ ID NO: 18553 - DNA, 201 bp, Homo sapiens
agcccacgacacagaccagaacctgagtgtggacaaatacgtggactccttcgggcggaccctggaggacctgacagaagacagcatgtggtgggtcctgyccccagcctaggcccgagggctctggaagcccagcaggtggagcaaggcctcatcttccataacaccaccagggagcggcaggcccagagcccagctctc

SEQ ID NO: 18554 - DNA, 201 bp, Homo sapiens
ttaatgttaaaatattttttaaaattcaggccaggcacggtggctcaagcctgttatcccagcactttgggcagatcacttgaggccaggagtttgagacyaacctggccaacagagcgaaacctcgtctctactaaaaatacaaaaaattagctggacgtggtggtgcacacctgtaatcccagctactcaggaggctga

SEQ ID NO: 18555 - DNA, 201 bp, Homo sapiens
attacatcacagctttgcttaaaacaatatttggctgactacggcccttaggataaaaggcagactcttcatcccactccaagcattggtggtctgccgamtatgggcccctccaacctcattgccttccccacacatctgctttctctcaaattttagaagtcaccatgcttcctcctgtctctctgcctagcgccatag

SEQ ID NO: 18556 - DNA, 201 bp, Homo sapiens
cctgcttcagctggcctggaagaaagcctgtatgagccacttggcaagtgactatgggtagcttctaggacctgagagcagtccttagctgacagctagcraaaaaacaaagacctcagtcctagaacttccggtttctcccaacaatctgcatgagcgtggaagaggaccccaagcctcagatgagaagcggccctgggt

SEQ ID NO: 18557 - DNA, 201 bp, Homo sapiens
taaatgtatcctctttgattattcttgcacttttttcctagtctgtctgtctgtctttttgccggtatctccctctccatctgtctctccttccctgtctstctctctgtctctgtccctttggctttttcatctgtctctctatctctctcagtctatctctgtatctctatctctcctttgcctctctctcctttcaca

SEQ ID NO: 18558 - DNA, 201 bp, Homo sapiens
gattacaggtgcccgccaccatgcccagctaatttttgtatttttagtagagacggggtttcaccatgttggccaggctgcccttgaactcctgacctcargtgatctactcacctcagcctcccaaagtgctgggattacaggcatgagccactgcacctagccccttgttgcacatttgaattatccagggagctgttt

SEQ ID NO: 18559 - DNA, 201 bp, Homo sapiens
agattgttatttcttcaaacagctttgagttactatatagtgtccttttatttcacctagaacaggttcagcagtgacacagtccttcagcttttgtttayctggggatgtcttaatttctccctcactttcaaaggacagttttgctggatacaagattcttagttgatagtttttttcttttagcctttttagtatatc

SEQ ID NO: 18560 - DNA, 201 bp, Homo sapiens
ccccataggcagtatgcccagcatagcagctctgagtgacagagtgagatcctgtctcaaaaacaaacagacaaacaaaaagtactacaaatatacagaamccccgacagtgtgacattggcataagaagggacatatagatcaaagaaattgaactaagagtccaaaaagaagcccttaaaattatgttcaattgatttc

SEQ ID NO: 18561 - DNA, 201 bp, Homo sapiens
catgcctgtactcccagctactcagaaggctggggtgggagaatcacttgagcccaggagatccaggctacaatgagctatgattcattaagcctggatcytgatagttaatggaaacttaaagagtttactaaacgctttcttggcaaagcctagctttaaaaacaacattgtcttatgaaggacaaaacaaaacaaaac

SEQ ID NO: 18562 - DNA, 201 bp, Homo sapiens
ggtgctcgtaatcccagctggggaggctgaggcaggagaatcgcttgaaccctagaggcagaggttacagtgagcagagattgcgccactacactccagcytaggtgacagagcaagactccgtctcaaaaaaaaaagaaagaaaaaaattaaaatccaaaccgtacctgtgaagaaaaacgtgactccatcttggatgct

SEQ ID NO: 18563 - DNA, 201 bp, Homo sapiens
ataagacctgcagattgattgctgggtcccttcagctgggagcttctggaacttagaacgtggggtctagcctgggcaacatggcaaaaccccatctctayaaaaaatacaaaagaattagccaggcatggtggcatatgcctgtagtcccagctactcaggaggctccagtgggaggaatgcttgattctggaaagcaga

SEQ ID NO: 18564 - DNA, 201 bp, Homo sapiens
attatcagaagtttgatagaaatagcattgaatctgtacattgctttgagcagtatggccactttaacaatattgattcttcctacatttgatgagttttratcattgtacccaccatgtaaataccacccaaatcaagatgtagaacatttccatctcctccctaaaatagaatttttttaaatttttttcaatttttta

SEQ ID NO: 18565 - DNA, 201 bp, Homo sapiens
ccaagggagagtgtgagtgggaatgtggttttggaaattacaaagaaaaatgtgcaggtagggaattcctttcagctggtagggcaagaccctgaccatgygcttaacacaggaagggcagaacaggtagttcaagactgagaaaagccttagaattggctggccatgggacactcagaaggacaccagcaacagggcttt

SEQ ID NO: 18566 - DNA, 201 bp, Homo sapiens
ttaagccacggcaccaggccagagatgtttactaagtgcttaaatgtgccaagtcctgtcccaagaattctgcatgcgacggcacaatccctccagccacyttgtgtgtggtactagtgctagctccatctttgaaaggagaaaactcacaccaagaaaggtgaagtcacgagttcagagtcacacagtcagtgtgcatag

SEQ ID NO: 18567 - DNA, 201 bp, Homo sapiens
caacctgatcataaaattcatttggaaacacaagggaaccccaaatagcccaaataatcttgaaaaagaagttggagggctcatacttcccaaattcaaawcttactacagccaggcatggtggcttatgtctgtgatcccagcactttaggaggccaagtcaggagactcccttcagttcaggaaatctcccttcaggcc

SEQ ID NO: 18568 - DNA, 201 bp, Homo sapiens
tgtgaagctgagatgggaggattgcttgaggccaggagttggagaccagcctggtcaacatagcaagaccctatctcaaattaaaaacaaacaaacaaacmaaaaaaaaacaggctgtgtaactctgtacctcagttttatcatctgtgacattgagttaacagtagtacctccctcatatggtttattaagattaaatga

SEQ ID NO: 18569 - DNA, 201 bp, Homo sapiens
ctcaggagtttgagaccagcctgggcaatgtggcaaaaccccgtctctacaaaaaaatacaacaattagctaggcatggtggggaacacccaaagtcccakctacttgggaggctgaggtgagaggatcgcttgagcttaggaggtagaggctacagtgagccaagatggtgccactgcactgcaggctgggcaacagagt

SEQ ID NO: 18570 - DNA, 201 bp, Homo sapiens
tagtttttttcttttagcctttttagtatatcagctcactgcctttgggcctctaaagtttttaatgagaaatttacttttaatcttattgagattccctygtatgtgagaagttgcttggtttttgctgctcttaagattttctgtttttgatttttaagagtttgattttaatgtgtcttggtgtaggtctctttgagt

SEQ ID NO: 18571 - DNA, 201 bp, Homo sapiens
gtctaaggaacagagtgaagccagtgtgcccgaagtgtcctgcagcttatcaccctcttcttgacctggtcagttgccctgacctttaatccctagacggkaaccaaagaaggagattcagaggccaataacttgactctgaccactccaatatcttctcattgaagtcatctttgtagtttcttcaggcctaaagggatg

SEQ ID NO: 18572 - DNA, 201 bp, Homo sapiens
atctgaggggcgattgctgcctaggataatcttaagaagataaaggaagggcccaaactggattgcattcctctaaaatctgcagccccaaatctgaagarggccagtgactaacagcacaaacaacagcaaacacctcacagggctcaacttacacaattctgaccgaacaattaaagttgagaaaatgtttcattcaat

SEQ ID NO: 18573 - DNA, 201 bp, Homo sapiens
ggaacctaaccatccctcaacactcccattacagagaagaaggaaacttacagaggccacagggtgagctagaggcagagtggaggcccatgtgtgtgccwtttatacctcctaagtcccgatcctaaaaagcattagattttaagcaaagggagattttccctcagtgaagacacaggcccaggatctgaggggcgattg

SEQ ID NO: 18574 - DNA, 201 bp, Homo sapiens
ggctggcagggaatggggctctcttccttgtggatgagccagagagaagttgccagggatgggggtgtgagagagattctggacaccccaggaaccagccyacagactatacatatcagccttcattcacttatttattccttcattcatccaatcattcatttactcaaatcatataactcattcactcagtcattcact

SEQ ID NO: 18575 - DNA, 201 bp, Homo sapiens
gcttttattagattgttagtggtgtctatgagtcagagaacttcaaaaagccctgatgcaaacattttaaagggctacttttctcctcctttctcccaggrtctgagctgatgcccaaagctctgctcatgtgtatcatatggtggcatatgatggttcttcatgctggagactgagaatttacatctctaacaagttccc

SEQ ID NO: 18576 - DNA, 201 bp, Homo sapiens
taatgtgtcatttatgccacagaatgtgatcctttttggtgagtgctccgtgtaagattgagaagaatgcgtatcctgctgttgttggatgaaatattctrcagatgtcagttagcccagctgagtgacggtgctattgagaaccattgttctagggaaaggggtctcagcttttattagattgttagtggtgtctatgag

SEQ ID NO: 18577 - DNA, 201 bp, Homo sapiens
ggtctgtagttttgtttttcttgcaatgtctttgtctggtttttggcattaaggtaatgctggcctcatagaatgaatcaggaagtatttctctgcttccmttttctggaagagattgtagagaattgctataatttttttttcttaaattcttggtataattcaccagtgaacccatctgggattaatgtgttctggttt

SEQ ID NO: 18578 - DNA, 201 bp, Homo sapiens
tattttgatacatgtatagaatgtgtaacaatcgaatcagggtaattgggatatccatcaccttatacatttatctgtatcttttcttcgtgttcgaaacwatacaatttattctagctatttagaaaggtaccataaatcattattaactataatttccctactgtgttatgaaatattagaacttattctttctaacta

SEQ ID NO: 18579 - DNA, 201 bp, Homo sapiens
ttcccaccaggaatatatgagcattcctgttgttccctattctatccagcagatggtattgtgtgttttggattactgacattgtaataggtgtgtaatartatatcagagtttactattcactaatgacatatgacattgagcatcttttcatatacttatttgacatctctatctcttctttggtgaggtgtccaggtc

SEQ ID NO: 18580 - DNA, 201 bp, Homo sapiens
tgagtttttaattttttttttttattttttgagacagagtctcgctccgtcaccaggctagagtgcagtggtgtgattttggctcactgcaacctccgccwcccgggttcaagtgattctcctgcctcagcctctcgagtagctgggattacgggcacacacgactacacctagttaatttttgtatttttagtaaagaca

SEQ ID NO: 18581 - DNA, 201 bp, Homo sapiens
atcaggtagactctaacagacgcctatagaagactccacattatagcagcaacatatacacattcttggaaagtagaagggtagcattatccagaattgamcatatgctcagccataaaataagcctcagtaaacttaagaggattgaaatcatacaaagtgtataatcttattccaatagaattaaattagaaatcagta

SEQ ID NO: 18582 - DNA, 201 bp, Homo sapiens
aaataggaaaaacattcatgtggtttaatatttgaaaggtacaaaatgggttgcagtgatgtctccctcccgcccagttccccagcctccccatcctcctmctggaggcaacactatcactgtctgctacatctcctgtcagagagatgctctgcagacacgagcacatacatacctacagtgcctccccgccttttccct

SEQ ID NO: 18583 - DNA, 201 bp, Homo sapiens
tcaggagccacaggagattgttgagcaggggagagacatgattaaggctgaggttctgattccccaggtgactctttgaggaagggtttccaagactaggkggtgctctgtgatgcccctggtggttggagggggcagcaaactgccctgcacagatggggtgactgaccgggtgagggctgtgggagggcctggaatatg

SEQ ID NO: 18584 - DNA, 201 bp, Homo sapiens
tggtggttcgcaggggccagtcgttcagcctcacgctggagctgagcagagccctggactgtgaggagatcctcatcttcacggtggagacaggtaactgrgcttgccagcaccctcttctcgtctgcagctggagggacctgtcttatgactcagtaacataagaccttgcagtcagcagctcaggctctgggggaagca

SEQ ID NO: 18585 - DNA, 201 bp, Homo sapiens
agtacccctgccctgagctggtggttcgcaggggccagtcgttcagcctcacgctggagctgagcagagccctggactgtgaggagatcctcatcttcacrgtggagacaggtaactgggcttgccagcaccctcttctcgtctgcagctggagggacctgtcttatgactcagtaacataagaccttgcagtcagcagct

SEQ ID NO: 18586 - DNA, 201 bp, Homo sapiens
aatggcgctgcccaccacacccaggagtacccctgccctgagctggtggttcgcaggggccagtcgttcagcctcacgctggagctgagcagagccctggwctgtgaggagatcctcatcttcacggtggagacaggtaactgggcttgccagcaccctcttctcgtctgcagctggagggacctgtcttatgactcagta

SEQ ID NO: 18587 - DNA, 201 bp, Homo sapiens
gaagggcttgtgggtcattgtcgggacttcaactctgctgagagagacaggaaccaatggagagcttgagaacaacgagtgatcttagattttaacaggawccttctggcttccatgttgagaatgagccctgaggatatgcgggggtgggggcacaggggaagtgaaatagggaacccagtgagcatgacagcatctaga

SEQ ID NO: 18588 - DNA, 201 bp, Homo sapiens
aggctgaggcaggagaatcaaactgcttgaacccaggaggcagaggttgcagtgagccaagatcacaccactgcactccagcctgggagaaaacaagaccytgcctcaaaaaaaaaaaaaaaactgcttggtatccacactttactggtgtcttaagcatgtgaacaactcatcacagatcaaaggggaggggccctgccc

SEQ ID NO: 18589 - DNA, 201 bp, Homo sapiens
ctggaaaattccactgtacattcagggctagggagatgctttgagtcctgaaaaaaatcatggtgcccttccaatccatataattaaaacaaaagtaaacytgaaattaagtaaacacaacacagtttttattttcccaaggtgagtcctttgattttttttttttaatgttaaaatattttttaaaattcaggccaggca

SEQ ID NO: 18590 - DNA, 201 bp, Homo sapiens
tgttaatttgtttaagttccttatagattctggatattagacctttgtcagatgcatggtttgcaaatattttcttccatcctgtaggttgtctgtttackctgttgatagtttcttttgctgtgcagaagctctttaatttaattaggtcccatttgtcagtttttgtttttgttgcagttacttttgtcttctttgtca

SEQ ID NO: 18591 - DNA, 201 bp, Homo sapiens
ctttgtgtccatgtatactcaaagtttagctcccacttataagtgagaacatgtggtatttggttttctgtttctgtgttagctaaattaaaataatggtycccagctccatccatgttgctgcaaaggacataatctcattcttttttatggctgtatagtatcccatggtgtatatgtaccacattttctttatccggt

SEQ ID NO: 18592 - DNA, 201 bp, Homo sapiens
agtaggccctggtgtctattgttcccttctttgtgtccatgtatactcaaagtttagctcccacttataagtgagaacatgtggtatttggttttctgttyctgtgttagctaaattaaaataatggttcccagctccatccatgttgctgcaaaggacataatctcattcttttttatggctgtatagtatcccatggtg

SEQ ID NO: 18593 - DNA, 201 bp, Homo sapiens
ctcctcccaccctccacccccaagtaggccctggtgtctattgttcccttctttgtgtccatgtatactcaaagtttagctcccacttataagtgagaacrtgtggtatttggttttctgtttctgtgttagctaaattaaaataatggttcccagctccatccatgttgctgcaaaggacataatctcattcttttttat

SEQ ID NO: 18594 - DNA, 201 bp, Homo sapiens
gtgaatcaggatcaactggggctgcttattaaaatgcagattctcacaatccatccccaagctcactggctgagactcaacgaggaataagcatttttatkgcatacagatgtgtctgatgcaggaggcccactgggcagacttggtgagcagaggcacagggggacccgggtcagctgcaatgtcttcctcttcctctcc

SEQ ID NO: 18595 - DNA, 201 bp, Homo sapiens
gtgtgaatcaggatcaactggggctgcttattaaaatgcagattctcacaatccatccccaagctcactggctgagactcaacgaggaataagcatttttwtggcatacagatgtgtctgatgcaggaggcccactgggcagacttggtgagcagaggcacagggggacccgggtcagctgcaatgtcttcctcttcctct

SEQ ID NO: 18596 - DNA, 201 bp, Homo sapiens
agctgctacaccagtcttgagactgtcaaattctggacactgtatgaactaaacaaataaagatctttaggattttaagccaccattgtcgaagatgctgktacttgcagagaaggcatttttaatcattacgaagaaaaacagatccacactcgaggagtttttatctaacgtgactggtagaatgtgctctaatggatg

SEQ ID NO: 18597 - DNA, 201 bp, Homo sapiens
cagcagtgccgggtgggtggggaggggggctgtaacaggtcatattttcccaaaatggccacagtagtatttctaattctatatgctctcctgtctcagtmaaaaggtggagtctaatttctcccttggaatatgggttgtcctttgagactgccttgactgctagagttcagtggcagtgatcctatgtgacttctgatc

SEQ ID NO: 18598 - DNA, 201 bp, Homo sapiens
cagcatgcctatggttaactagagtttgaaatttgtttacagtttttttcttggtgttaaattcacatataatgagatgtacaaatctaaagtgtacattkgctgcattttaataaatgcctatgtaatcaatattccaatcaaaatatagaaaaaatgatcactccagaaactcccctcatgcccctttccaatctctgt

SEQ ID NO: 18599 - DNA, 201 bp, Homo sapiens
aacaataagccccagaaataactcaagaggcaacaaaaggagaactctgagaggtggtaagaagaagatgaactggttagagatcccaggactggaggaamaacacagcagccaagcatcttacagctcacacccaacagaggaaggttacccagccccagccccagtatagcaactgaaggtggctcgggtttctgcagg

SEQ ID NO: 18600 - DNA, 201 bp, Homo sapiens
tttttctaatcagcttactaaaaggtgaaacgagaaaatgtttttcccccttttaaagaaagtatttttatttttactttttattaatgacttacacactkactaggcctgcccttagcaattgccaggctggggcaggagtagaaacggaggcttatgaatttggtatgcaaatatttaaaagtcataagtcatgttaat

SEQ ID NO: 18601 - DNA, 201 bp, Homo sapiens
tattctatgatttgaaaagctgtcatctcagcactttgggaggccaaggcgggtggatcacgaggtcaggagattgagaccatcctggccatggtgaaacyccatctctactaaaagtaaatttaaaaaaaaaattagctgagcatggtggcgggtgcctgtagtcccagctacttgggaggctgaagcagaagcaaggtg

SEQ ID NO: 18602 - DNA, 201 bp, Homo sapiens
aatgacagtgcatagctatattctatgatttgaaaagctgtcatctcagcactttgggaggccaaggcgggtggatcacgaggtcaggagattgagaccakcctggccatggtgaaactccatctctactaaaagtaaatttaaaaaaaaaattagctgagcatggtggcgggtgcctgtagtcccagctacttgggaggc

SEQ ID NO: 18603 - DNA, 201 bp, Homo sapiens
ttacaaggtgtcaccattgggagaaactgggtaaacagtaacctgggatttttctgtgttatttctcacaactgcatgtgaatctacaattaccccaaaaytgaaagtttaactttaaaaagacacctcagccaacatgttcaagtgctatcggtaccatcacaaatagctgccctggtccatttctcagatctggaggta

SEQ ID NO: 18604 - DNA, 201 bp, Homo sapiens
tctgttctcctccaggattgcatctagggagcctggaatgggggcttctgtgagggaggttgggacccacatgttctctgtttacagacttgtctgctttmgcctggtccttgattggtgacagttgatgtgtgtctgatcacaactggccttctggatgtggtgctggctcccagcactggaggctgtggtccctgccct

SEQ ID NO: 18605 - DNA, 201 bp, Homo sapiens
gaggcagatagaaaggaccgggaagagcctgacctcgactggctggaattaatcccaatttagtgggttacagcagtgccgggtgggtggggaggggggcygtaacaggtcatattttcccaaaatggccacagtagtatttctaattctatatgctctcctgtctcagtcaaaaggtggagtctaatttctcccttggaa

SEQ ID NO: 18606 - DNA, 201 bp, Homo sapiens
caagatgcctggatctgcagcaaccacctggtggcaatgaagcaacaggcacagaaaacagccaagagtcaaggatagtgaaacacagacgttgaaggaaygaggccctttggcgccactgctgagctgctacaccagtcttgagactgtcaaattctggacactgtatgaactaaacaaataaagatctttaggatttta

SEQ ID NO: 18607 - DNA, 201 bp, Homo sapiens
cagggtggtaaggtttctcaaatttctgtgtgaatcaggatcaactggggctgcttattaaaatgcagattctcacaatccatccccaagctcactggctragactcaacgaggaataagcatttttatggcatacagatgtgtctgatgcaggaggcccactgggcagacttggtgagcagaggcacagggggacccggg

SEQ ID NO: 18608 - DNA, 201 bp, Homo sapiens
ttgtacctgctgcacccttctcctcacatcctctcggcacctgtaggaggggggccagcttcctaacccatgacccaactcagtgggcaggtttgttctarcctcttgacattagctacgccaggtctggccagcacggtgcccagacattgcattccatggggtttgctcaagggaggtaaaagctttatttgttctaca

SEQ ID NO: 18609 - DNA, 201 bp, Homo sapiens
cacttttttctttctttagaaacagggtctcactctgttgcccaggctggagtgcagtagcaccatcatagctcattgtaaccttgaactcctgggctcawgcagtcctctcgcctcagcctcccaagtagttgggactacaggcactcaccaccgcacctgtctaatttaaaaaaaaaaaatttttttagagacagggcc

SEQ ID NO: 18610 - DNA, 201 bp, Homo sapiens
tctttagaaacagggtctcactctgttgcccaggctggagtgcagtagcaccatcatagctcattgtaaccttgaactcctgggctcaagcagtcctctckcctcagcctcccaagtagttgggactacaggcactcaccaccgcacctgtctaatttaaaaaaaaaaaatttttttagagacagggcctcactatgctgc

SEQ ID NO: 18611 - DNA, 201 bp, Homo sapiens
atccagtagacaaatgtcccttgaataccccattttcagcatagaccctagacctcagctgagcttgttgtgcttcagcccagagaccctctcttttactmtcactgaagaacaaagccacagacttttgttgggccagggaaggggcagtgattcagctcacagaatgtggaggggacctgggacccactacttcataaa

SEQ ID NO: 18612 - DNA, 201 bp, Homo sapiens
tcagcctcatctttacttgagtccacagcctcaggctccctcccctgtgatttgggtcagtctgaagttttctcttaagggacagacctggaatcctagargggaagtgcactctaggccagcagttctcaatcttttggggctcaagacccctttacacttttaaaaattattgagatgccaaagagcacttgcttatgt

SEQ ID NO: 18613 - DNA, 201 bp, Homo sapiens
aagttttctcttaagggacagacctggaatcctagaggggaagtgcactctaggccagcagttctcaatcttttggggctcaagacccctttacacttttwaaaattattgagatgccaaagagcacttgcttatgtgggttatatctatagtttttttttactgatttggaagctaacaatgagaaacttacaaaaatgt

SEQ ID NO: 18614 - DNA, 201 bp, Homo sapiens
tgtatgcattaattcacttagaaactaaaaaacctattgcatcttaacacatacaacatgtatttatgaaaaataactgtactttccaagaacaaaaatarcattagtatgagtggcattgttttagatataaatttttttttgcaaatttctttaactaaatggcaggcttaacagagaacagctggattctcatagctg

SEQ ID NO: 18615 - DNA, 201 bp, Homo sapiens
aactgtactttccaagaacaaaaatagcattagtatgagtggcattgttttagatataaatttttttttgcaaatttctttaactaaatggcaggcttaayagagaacagctggattctcatagctgcttttgtattcaattttttaaacattatatatcatgaagcctctggaaaattccactgtacattcagggctagg

SEQ ID NO: 18616 - DNA, 201 bp, Homo sapiens
ttgcaaatttctttaactaaatggcaggcttaacagagaacagctggattctcatagctgcttttgtattcaattttttaaacattatatatcatgaagcytctggaaaattccactgtacattcagggctagggagatgctttgagtcctgaaaaaaatcatggtgcccttccaatccatataattaaaacaaaagtaaa

SEQ ID NO: 18617 - DNA, 201 bp, Homo sapiens
aagagtttgaacttaggaccttgttgggagtgagaagccacagggcctttggaatgaggagtgccacagaataaaaatggtggtttgaggatacgtatgtrtctagagggaaatttggcaaaatatatcataattttgcttgtttatttgtttttagagacagagtcttgctacgttgcccaggctggacccaaactgggc

SEQ ID NO: 18618 - DNA, 201 bp, Homo sapiens
aacagcattgctggacgtgttgggcccttcaggctcctaggataggtctgttctgaagaccaggccttgccaacaccagctcacagcccagactgcctgtktccagagctggggttgcctccctgatggccctggtgcagaggggattgcctttgttcctccaagatctgcttctcaaagttcacctagatgatccctctt

SEQ ID NO: 18619 - DNA, 201 bp, Homo sapiens
atggggtgagtgtagagttgggcaggggaggtgccgggggctggcagattgggatttctaggtggtttctgcaaaaccccatcaaggagcaaaagaagaaktgtgttctatggggttaatggggagcaaaatagggacaaatggggagaagttgcaagaagaaagagcttggctcagcagaaggaagggctttctaacact

SEQ ID NO: 18620 - DNA, 201 bp, Homo sapiens
ggatttctaggtggtttctgcaaaaccccatcaaggagcaaaagaagaattgtgttctatggggttaatggggagcaaaatagggacaaatggggagaagytgcaagaagaaagagcttggctcagcagaaggaagggctttctaacactgggcggtgagtgagctacctctcagaggtatggcaagctgggaccatgatc

SEQ ID NO: 18621 - DNA, 201 bp, Homo sapiens
ttaagaagcaatagatgagtaaaacatcaacttttttgtccgtaataccctccctctcaatataacaagtatttaatagtgtcccttcaccaacctgaaawtgaattgacacatcttacctacctctatactccactttttaaaaaattgtatcctaactataatataaatagtaaataagaggaaatcaatttttcacta

SEQ ID NO: 18622 - DNA, 201 bp, Homo sapiens
cccccctggattttttagctctgtcactctgtgagaatctgcattcatagcccaatccttatggagcgactgaccagggatccctcctctcatcatgcggrttcctttctcctattatgcatctgccacaagtgaaaggaacactgtaagcatcttccctggaacaggaggccatctgccactccacgtataaagatgctc

SEQ ID NO: 18623 - DNA, 201 bp, Homo sapiens
tgtttgatgaaatgcctgggcaccccatggaccggtcaaattgacacattataactgaccatcacagtgctgaatgaagatggccattgaatagaccttaraaagcagtggcagtctaagttggctattgctatttgtaaaattggtttgcatcaaacataggcatgggaggcagggagttaatattgtctaataacaaca

SEQ ID NO: 18624 - DNA, 201 bp, Homo sapiens
cctcagagctgacttggatagatgagagggtggtatggtggtgcacttgcatttacatttcttcttctttgttttttgctttttttttatttttatttttwtttttgagacagggtctcactctgttgcccaggtagggagtgcagtcacgtgatctcagcttactgcaacttccaccgcctgggttcaagtgattctccc

SEQ ID NO: 18625 - DNA, 201 bp, Homo sapiens
ctcctgggttcaagcaattctcctgcctcaccctcccaagtagctgggattacaggtgcccgccaccatgcccagctaatttttgtatttttagtagagayggggtttcaccatgttggccaggctgcccttgaactcctgacctcaggtgatctactcacctcagcctcccaaagtgctgggattacaggcatgagccac

SEQ ID NO: 18626 - DNA, 201 bp, Homo sapiens
agttcctttaaggctagaaactgtgtcttattcatttttaatccttccctcttccccaccattatcatctgaaataaatgaatgaatgaaaagattctgarcaaggtaatgcctggtagcaggatcaggtctaactcctcactcttccacaatgcctcacccacatagacactaacataggcttggtggttggccaaatga

SEQ ID NO: 18627 - DNA, 201 bp, Homo sapiens
ggatgacgtttgatcatcgattgttaggattttacagctggatagtccaccatgaacacatgaactcttcgtgtggattcatgaggcccaggatgaaaaarccagctttaagccacccagcaaggccatggcccaggctggctcaggcgctgtctcctgggctggggccaggtctcacccctgtgcctcggaggactgaag

SEQ ID NO: 18628 - DNA, 201 bp, Homo sapiens; identical to SEQ ID NO: 2584

SEQ ID NO: 18629 - DNA, 201 bp, Homo sapiens
gcacaggcccaattcagactaataataatagcatctcctgtttagcatctgccagggcctgtgccgtgataccaatttatggccattggttcattgaagakcccctacttgttaggctacaaaaacaaaacagttgtattttttcttatagctgtttccaactatatactttaaaaatctccctttcccactgtgtaacag

SEQ ID NO: 18630 - DNA, 201 bp, Homo sapiens
gaaacacgggtctgtgggatgacgtttgatcatcgattgttaggattttacagctggatagtccaccatgaacacatgaactcttcgtgtggattcatgakgcccaggatgaaaaagccagctttaagccacccagcaaggccatggcccaggctggctcaggcgctgtctcctgggctggggccaggtctcacccctgtg

SEQ ID NO: 18631 - DNA, 201 bp, Homo sapiens
ttccatgaaccttttgaagtccccttgtaggtgtttagggaggggaatgtagctgaaggtggtgagggccacctgccacatagctctgtttccagtacaaygctcttgcccttggtgccttcgagtagcattttaatgggacaaaagtggcctccctggttattccagccccagtggaaagcagaagccgccccaacagcc

SEQ ID NO: 18632 - DNA, 201 bp, Homo sapiens
tccatttgaaattacatatcaagttatggtcaaaaccccattgtctctaattcccacaccttttggttgaatcatatgaaattaccatttcatagataaarcaggtcaaatattagcaatttcatatggttcagtctaatcacttttccaatgagtgggacaactcttttgcaaagggcaagagatccatagaaaagggat

SEQ ID NO: 18633 - DNA, 201 bp, Homo sapiens
gcaaagggcaagagatccatagaaaagggattggttgttgatgtgctaattttaagtcatgcattcataagtttaagaaatatcttagtaatgaatctgasccagagtatacattgacccttgattaacaagggtttgaagcaagcaagtccacttatgtgcaaattttctttcatctctgccacatctgagacagcgaga

SEQ ID NO: 18634 - DNA, 201 bp, Homo sapiens
agctataattttggttttggtgtgttggtgaagaaatctgtcgttccacagtgttgctgttatctctcagaatgactttactgatggtgctggaaatcttyggagtgcttcagcagagaactcggcgtgcacccccactgttcctctcagctacaagctccaagccgctgggctactgtgcccagggtggattctggcttt

SEQ ID NO: 18635 - DNA, 201 bp, Homo sapiens
ttgatatgatcccctaaaaaggagtaaatctgctagctttttctttttttaatgtgaaagctatgcaagccctcaggcagattctcaagcacttttggttycctagcaaatctctggtaccttaagaatcctcttggaagacccaggaattctggaatgagtagtagcttgtagaggcacaaaagacagcaagaatctcaa

SEQ ID NO: 18636 - DNA, 201 bp, Homo sapiens
aaagaagtagtcgagaatatattgacttagttgacagcgtggaaacatatgaaaaagcaaaacacaagcacaaacaaataaacccagcaaccacacgagamcaacccaccccctttcgctgcccttccccacacaaagaccacagaaaccgccattttttccccccatccaatgaaaatagttctcaggttgtaagaaaac

SEQ ID NO: 18637 - DNA, 201 bp, Homo sapiens; identical to SEQ ID NO: 5151

SEQ ID NO: 18638 - DNA, 201 bp, Homo sapiens; identical to SEQ ID NO: 5152

SEQ ID NO: 18639 - DNA, 201 bp, Homo sapiens
ggtatggtggtatcaataagtatttgtatcatgttataaatgactttctttctcagtgactggcatccaaccaagcatctacatctgattttcctttctayctacatcccaaatctttccactgatttcaccatgctaggtcagtgctgccactccattctccagtcaccttcatctagatcaatggttttcaaacttctt

SEQ ID NO: 18640 - DNA, 201 bp, Homo sapiens
cagaacacaaaatgaagggctgctgatggcataccccgaacatatgacatcaacatatagatggcaattatagtctagaaaataacccttcatacttactrggatattaaactgaagaaaatgaggcagatttggtcccttagagaagaaacagatttcccactatctgataaggatgtggttttctttacttactgtgta

SEQ ID NO: 18641 - DNA, 201 bp, Homo sapiens
tcaatgacagtataagcaaatcattttatctatccattattatttggcccggtaatgaaaatgaaaaaaacaaacagctggtgatataagaaaacatgcaygcttaaaacatctgaactatatttaaatccataatataagtcagtttgctctttcaacttagggaccaaaaaatcagttaattaatcattcaattgctaa

SEQ ID NO: 18642 - DNA, 201 bp, Homo sapiens
ccacagaaatccctttatgctttaagaaagttcaatctccatatttctaccacaaagcggcatttcagaaaatcttagtaggtaaacggtagagtgtaaartacagttaacttggactcagaaggcccaggcttcagccctgacagcccctagtactgcagccttgggcgagccactcagtacgcatctgcaagattgata

SEQ ID NO: 18643 - DNA, 201 bp, Homo sapiens
aaactaagttcctttcataatttatggctacccgaacacaaagttgaggtgggagttttctaaactttcatgaatcaaataaatgcctatacaagactagwaaggcagatgacaattaaatagcagcagcaacacagttaggtttggtttggttttattataatcagaaatttgttctttgcttgtgatatctcctttctt

SEQ ID NO: 18644 - DNA, 201 bp, Homo sapiens
acactaaatgagccccagtggagtcaatattgaaactgcacaataaccgtgtacactttggatctgtcctctttctaggatggtccatggtcccatgtcaytgtgatgacctacttcagagtgctgctggcatcttagaggacaggttttagtaactagcaaagtcatggaccaataggaaggcctgagaggaatgtgtaa

SEQ ID NO: 18645 - DNA, 201 bp, Homo sapiens
catctgttgtcaggaaaaaaggtcacttgttaaattttgccaggcaacaggtttttctacaagcaaaaaaaaaaaaaaaaaaatatatatatatatatatrcacatatatacaatgtcagatatatatagatagagatagagatagatataaatctgacactgtttcttaactgagcaggtaatcctccagaaaggaaagt

SEQ ID NO: 18646 - DNA, 201 bp, Homo sapiens
taggctattagtagttaagttttgcgggggtcaaagttgcataggcattttcaactgcgtgggtgtggggaggagttggtgccccgacccctgcattgttygagggttgactgtattgctttggtggccacggcttcccatggactgcttgtggtccatgcagacaggcctctttgcgtttaacacaaataataaaaataa

SEQ ID NO: 18647 - DNA, 201 bp, Homo sapiens
aagtaatattggaatatgagacactattttaaaaatacagttgctgttaacgttcttctctctctgtctctctttctctctctctgtctggtgtttggatrtgtccacatggctcccacatgaggaagcaaacatcttcagcataaaggtgttttgaatgatgaatcaggtcagattttatccacaactcaggtctgcatc

SEQ ID NO: 18648 - DNA, 201 bp, Homo sapiens
acgactttgatttgagaagtaaccagaatttaaagatcctttgaattcttaggagatacaggttttctcatatgaaagagttaagagtctacaagaacgaytgtgaatgagatgcagcaagcctagcattttagaatccagcctctgagttttgaacagacctgggtttgaattccagctctgaccttatgagcacatgac

SEQ ID NO: 18649 - DNA, 201 bp, Homo sapiens
actttcctttaattgaactaagcattgtgcttctttactactgactatggaaacagagaactttcttgacttaattcaatattgtcctgttctgtacgttaaaaaaaaaaaaggtttccatttgtcctttataaattttagcacttcatgaactattccttaaggtagaaacaaaatcttatatttgatgttatgacctta

SEQ ID NO: 18650 - DNA, 201 bp, Homo sapiens
agtatgtgcctactgtggtgtgaggcaccgatgttataaaattaaaatcaaaaagtcattaaaaattacgcctccattgtgtgcattttgcggatcatgcactctatatattacctctaattctttcaataaaaatgttgcattggcataatgaatatgggataatccccgttttgcagataagaaaacagactagaatgg

SEQ ID NO: 18651 - DNA, 201 bp, Homo sapiens
actgactttaactagtctgatgatttttcttttttcctgggaacttcttagtcacaagatgaaaagacttgattaatgtccatttccctttgtggcagaarcctcaagctaccctcctacactcattttccttttgtgctgaaaaatgggcccctctagctggctcaaggaggacatttgtagcttcctttgcagctatgc

SEQ ID NO: 18652 - DNA, 201 bp, Homo sapiens
ctttaaagcactaatgttaataatttgaattatctatcatttactggtttaacacctaccaaatatacattgaaattatgtcattatggtctaaagtgttaaaaaaaatcataatcctgcatgattatagccctgtgtgacaagtggcataaataaatttaggtattattgaaaaataggaaatatatctttcacattttc

SEQ ID NO: 18653 - DNA, 201 bp, Homo sapiens
aatttactctactgatttgaaaatgtatgttcataccaaaacctgcacacaagtgtttatagcagatttattcataatcagtaaaaaaaagtccttcaatrcgtaaatggatgaacagagtgtggtacatccatacagtaaaacattattcagtgataaaaagaaatgagccaccaagccatgaaaagacatggttgaact

SEQ ID NO: 18654 - DNA, 201 bp, Homo sapiens
agtaaaacattattcagtgataaaaagaaatgagccaccaagccatgaaaagacatggttgaactttaaaatgcatactgctgattgaaagaagccagtcaaaaaaaaaaaaaaaaaaagctacatcccatttgcttccaattatatgtggacagtaaacattggttgccatgcatcaggaagggaagatggttgaatata

SEQ ID NO: 18655 - DNA, 201 bp, Homo sapiens
ttttttttttttttttttttttttttggtaaaccatgatagatgagggtctattgttggccaagcatgacaaggagctgggtcctatcattaatcatactkaagaaaaagaaacttccagagtattcctttcacctagtgagtctactataagggactttaatccatctgtgcctggtatcctttctatcaggtttctaag

SEQ ID NO: 18656 - DNA, 201 bp, Homo sapiens
gggaaggaaagagtgagagatgttttgagtgtgtgtgggtagacagtggtaagaatatatgtgttcccagggacattttggcttcctaagactttgtgagygctaaggtaacgttggcttctggattcgcctacttgaagcatttcagagccaagattagaaaatcagagccaaggacaagaatcatgcactatttattct

SEQ ID NO: 18657 - DNA, 201 bp, Homo sapiens
ctagatgagctccccaaactccaaatactttggatggaatgcactattttacgcattccttaatttgaatcaacatatccctcttttaaaatgctggggtaggggggaaaggacaactgtaaatatataaagtcagcccaaatccttcacatcttggtttgaattactttaatctgattgttttcctcagaaagtttatgt

SEQ ID NO: 18658 - DNA, 201 bp, Homo sapiens
gtactaacatgtgcaggcctttcaaacactttctaatcccagcaacaacctctgtttcattgcagaagtagatgaatatttggagaaagcctacatatttaaaaaaaaaaaagcctcaggaaaactttccaattgattttgcttactcttaatcatttgttctgattgctcagggtaatgaggatgacagaggttgctcta

SEQ ID NO: 18659 - DNA, 201 bp, Homo sapiens
aaggctctactggatggatctatgacaaacctcagaatacatattttaatcatttgatccccaagaattaaaaaaaatattttttatagtgccacccacaygtaatatgtccttgtactggtacaacccatttttaatactttgctttttcctctcttccttgtaaaaaatggcactgaataaaggattattatgttttat

SEQ ID NO: 18660 - DNA, 201 bp, Homo sapiens
aagacaataaagtttgctttaaaaaagaatttcgtggatttttctcatttttgtgaggagcagcaagaactttgggattaactagcccccatccttgcatggcacatgtgaaccattaagacgtagagagtaaggccaggtgctgtggctcatgcttgtaatcccagcacttcgtgaggctgaggtgggtggatcatctga

SEQ ID NO: 18661 - DNA, 201 bp, Homo sapiens
tttatgtttacttttattttatgttttatattttattttatgtttatttttattttattttattggctagtactttcaatgtgttaaaggtagttgttataggggcatccttatctcattattttactatgagaattatcaggaaacattaggtttcctctgtaaacataagactaaattttatgctcagataaatacttt

SEQ ID NO: 18662 - DNA, 201 bp, Homo sapiens
gtatagcacactatttctggtttaatttaagcattattttcattttcttgattctggtaacatatctccatattttataaatatttctatatttatctcaktgcattaaaatataaatctgtgatttcaaattagggaaactatcattacgagtatgcttttcttccccctttttccttaacttggtgtgtatattccttt

SEQ ID NO: 18663 - DNA, 201 bp, Homo sapiens
taatttaagcattattttcattttcttgattctggtaacatatctccatattttataaatatttctatatttatctcattgcattaaaatataaatctgtkatttcaaattagggaaactatcattacgagtatgcttttcttccccctttttccttaacttggtgtgtatattcctttcaatgcaaaagttacagccttt

SEQ ID NO: 18664 - DNA, 201 bp, Homo sapiens
agaagaacaatgcctctatctctgtgcatgaatgaaaaatgaacaattcaatccatcatctgcatggtgatccaagtcagcagttctaaatcggtgccagwtgcaggacggggggtcctataggagaatgattaggctcacaaagacctatcaaaatctctggaaattgagtgctggcaagggaagcacctcatttgagac

SEQ ID NO: 18665 - DNA, 201 bp, Homo sapiens
cttgccaaatcagcatctacatttttaataagattccagtgatttacaaaaatttaatgtttgagaagcactgaatatgtctcttaattctctctctctctttttttttttttttgagaggaagtctcactctgtcatccaggctggagtgcagtggcatgatcttggctcactgcaacctccacctcctgggttcaagcg

SEQ ID NO: 18666 - DNA, 201 bp, Homo sapiens
tcagtgaaacttcctcactccaaaaacgtcttcttccccacttctccctgtcattcattaatcaaaccttttttcatttttaagatccttaagaacactayctccattaattaggtagcttttcctgattccttacatcattttataacttaaagggagagtgatgctttaaactgttgcatgattttctgaatacatacc

SEQ ID NO: 18667 - DNA, 201 bp, Homo sapiens
acctgctattcacaagcatctatgacaattgccttacgtggactatctcatttaatccacaccacaagaggaagaaagtatacgataacaacctttctccrtttcacatatgaggcggcagctaaagtaccctgtgcctgcttctgcacctaggacgagcccatctttctaatcactgcatggtaattggaacaacggaca

SEQ ID NO: 18668 - DNA, 201 bp, Homo sapiens
tgagaatggacctacaactttaggtactaaaaatgctaatcctgtatccagcttaatccccacaaccatatggtgatgtaaatatgatcattgtcacaccttttttttttttttcttttatagctaaggaaacaggctcagagaaatcaactgatttgtcaaagtcacccagccaggatttcaagcccatccttctttcat

SEQ ID NO: 18669 - DNA, 201 bp, Homo sapiens
agtcttcactttccaggcttggaccagggtaggactgtgaaaagacaaaagtgacattgttgcaaattatcatcttcttgctcttcatcatcatatcaaacacacttgaccctttagatattattacaagcagcatatggatttggcaaagacatttcaaaccttcagattatcctgctgccatttcatcattatgcatga

SEQ ID NO: 18670 - DNA, 201 bp, Homo sapiens
ccgggtgtggtggcgcatgcctgtagtcccagctactcgggaggctgaggcaggagaattacttgaacccaggaagcggaggttgcggtgagctgagagcrtgccacgacactccagcgtggggtgacagagcaagactctgtctcaaaaaaaaaaaaaaaagagaaaagagaaagaaattctcctgaataaggcacaact

SEQ ID NO: 18671 - DNA, 201 bp, Homo sapiens
ctgaataaggcacaactaatgccagcaataatggagaaagatgtttttaattttaggaatgccattaaatctctgaaaatactaagggataatccacctayagtagaccaccactttacactctagggtttcttcagtagttaattcttaatttgtggtgtttaaaagaaggtttaattggtatcactttacattcagtga

SEQ ID NO: 18672 - DNA, 201 bp, Homo sapiens
cacatttagcttataaagtgctacatctttctctgatgagaaggagacagatgttggactaggcgagaatacgcatgacttcttcagtgactgttaagaayggccactgtgcatgttgccaagaattgaggctttgaagcccaatggacaaggtctgcttccaagtcctttaaaccacatattaatttgggttctgcagca

SEQ ID NO: 18673 - DNA, 201 bp, Homo sapiens
atagtggatccttctgatttgctttggtttgatctgcttggatgccttttcagccatttcactaaagccaaagtccttccctgaagtccaaccttcccagmctcccatttcagtagaaaaggaaacttctcacctgattctgggagatctcatttcccctgcctgtttaatgacatactcacattcctttttaatcatact

SEQ ID NO: 18674 - DNA, 201 bp, Homo sapiens
atggtgccagagtaaaatggaaatcttatgagtttttattatatacttgtcaggcttattataaggtggtatattcaatttaaaagctgcctatcagttayaaaactatatgcaaaaaattttaaggatttgtatactctagcttaagaggtagagaatgcatgcagtagatagtgccaaagagccctttgggactgtcta

SEQ ID NO: 18675 - DNA, 201 bp, Homo sapiens
gtgaattgacagactgggtaaagcagattgctctccccaaggtgggtgggcctcagccaattagttgaaggcttgactagaacagtaaggactgactagastaaatgaattcctcctgactcactgttgaggtgagacatcagtctttcactgttttggggcatgacttgaaataacattggctcttgttggacctcaaac

SEQ ID NO: 18676 - DNA, 201 bp, Homo sapiens
gttaactcaaaataaacatacactgtattacacaaactttggagttataatcactctcggtgactatagaataacaaaataaattcttcaaactacacataaaaactgccacttgttatgatcaaaacctaaaagctctaagaaaaattaccgatttgttagttaggattctatttatcctttcatgcgaaaaactaatta

SEQ ID NO: 18677 - DNA, 201 bp, Homo sapiens
gaggcaagagaatcgcttgaacctgggacacggaggttgcagtgagccgggattgcaccactgcactctagcctggagacagagtgagactccgtctaataaaaaaaaaaaatgaagtttgccacatctactgactctttcttccatgaaagatttctctgcagcatgtgatgctgtttgatagcatgctacctacagtag

SEQ ID NO: 18678 - DNA, 201 bp, Homo sapiens
aacctgatgaaagaaatacaaaaacaaatgaaagctgaaatctgtgatctttagaatttcagtaaacaatttcaggaaaaaaaaaccaataaattaaagcwctatgacctgaaaaaggactttaaatccctgcatggtatagtaagtcaaaggagaaaaaaaaaagaaactaagaagtcaacaaagtttctgaaaactaaa

SEQ ID NO: 18679 - DNA, 201 bp, Homo sapiens
cctgatgaaagaaatacaaaaacaaatgaaagctgaaatctgtgatctttagaatttcagtaaacaatttcaggaaaaaaaaaccaataaattaaagcacyatgacctgaaaaaggactttaaatccctgcatggtatagtaagtcaaaggagaaaaaaaaaagaaactaagaagtcaacaaagtttctgaaaactaaata

SEQ ID NO: 18680 - DNA, 201 bp, Homo sapiens
aagtaataaaatagtcataggagaaatgtcttataaataactgggctgtgacatctttccctttatcagtaaaagtatctctctattgtcaaggagacaayggcacaatttaaaatacagaagtacttttttttttttttttttttgagacggagtttcacttttgtttggcccaggctggggtgcaacggcacaatggcg

SEQ ID NO: 18681 - DNA, 201 bp, Homo sapiens
acactcaactacagatctgaatggtatggagaggaagaatggcctgggtacagtgcggctgcttggaagacttggccacgggtgggcaaaagatagtgctrgacccacaacttagaagctggactccactttggggctgagtttgtattttcatttttgtcccagtgatatacttatttggaggaatattagatattcttt

SEQ ID NO: 18682 - DNA, 201 bp, Homo sapiens
tcttcaaaaggaaattctaacacatgctacaacttggatgaaccttgagaacactatgataagtgaaataagccagatacagaaaataaaaaataaaagasaaatactgtatgattccacttgcatgaggcacctagagtagtcaatatttatacagacagaaagtagaatggcagttgtcaggggctaggaggtagaaaa

SEQ ID NO: 18683 - DNA, 201 bp, Homo sapiens
attgcacacttaaagtggttaggatggtaaattttatgttatgtgtattttgccacagtttttaaaatttaaaaatttaacaaaatatcaaaatgttaaayaaaggcaggactggtatacattttctgacaaatatctgcttcagtagtaaatgatcagctgaacacaaatctctttcttcttgtatttccatgaattggt

SEQ ID NO: 18684 - DNA, 201 bp, Homo sapiens
gatatccatttttaaataaaactctggttaaaatgttcagttcttaggactttcagggttctaccagatttggtgttggacctgatttcatttttcagcayttattggactcaagaggcataccagtcaagactttctcatctccaaacaatattttttaaaaagttgtagaattctctattccaaagagattcggcagca

SEQ ID NO: 18685 - DNA, 201 bp, Homo sapiens
cataaacttttcctgactacagttctaaaagaggagtttcaaaaattttttgaactctgggagcaataataaaatgagtttgcagcctcccaaggtgactrctttgaatgcaacactcattttgggaatataaattctggtctatgtggtaaaatgaaactagttccattgctctatagttatacattgttttcagcataa

SEQ ID NO: 18686 - DNA, 201 bp, Homo sapiens
cctattttcttattctgtagtcagagaaaattaagcatgaataatcaccaccctatgtctaatgccaatgtggacttaaacacctttgagtctttgttttstgggtttcataatcttgaatcctctctttttctgctactaccttctaactttcggccttccagccaattttatgaccttttccaacttccccctttaaat

SEQ ID NO: 18687 - DNA, 201 bp, Homo sapiens
gcaacaagacagtgggcagtttgagtcctactctgccacagccactgtgggcaagccatttactctctctgcctagagactgtctagaaaatggggctaaytcctactgtgcaggtttgctgtgatgggaaataggaacacgtgtaaaatgcctaccacagtgtaaggcacacagaagctactctgtagacggatgccatg

SEQ ID NO: 18688 - DNA, 201 bp, Homo sapiens
gaacacgtgtaaaatgcctaccacagtgtaaggcacacagaagctactctgtagacggatgccatgtatatttttgttactattggaaacaattcaatatyctggtaagaatgggccaggatttccattggaagttacaaaagcgagaatatttgtttcctaggattaagcgttttatttttggcagagttcaacgttatt

SEQ ID NO: 18689 - DNA, 201 bp, Homo sapiens
tgcgggagagcacattgagaggactcatgagcagcatggcccagcagaagactgagggcagtgcaggtcaatgtcagccttggccagtggctacctgcagrtgtctttcctcttcagtgaaatgttgataatcaagcctacttcaagggataaggcctgaggattaagggaacttatgcacgtaagatgatcctttaaaaa

SEQ ID NO: 18690 - DNA, 201 bp, Homo sapiens
atcctttaaaaacgtaagtcccatcagggtatctgtcccttaccagaacccattctgtggcttccctttgtactgagaatgaacccagtgcctttcaaatktcctgcaagtccttcaggattgggctcctgcccatctttccaacttcagctcaaaccacactctctccattcactcagctctggccacacagaccttttc

SEQ ID NO: 18691 - DNA, 201 bp, Homo sapiens
tcagtaaaggccaatggcatgggggcctggaggcaatttaagaaagggatatggagaagtagaaagttggctcaggttgaagaatgtactgtgactaatcyacaaaaccaatcatccacaggtggacaatattttagaaatggcccaggggatgctgctctggtcttttggagctgaacgaatatttccatatcgtatagc

SEQ ID NO: 18692 - DNA, 201 bp, Homo sapiens
taaagcagaacattttgcttaaggtaaacaaatgactaaccttgtcaacagaattataacaggactgtatgaaatgaatgtgctaatttttctcctaaagkggggggcttcagccttgacttctgtatttggcattttggtctaataaaagccaagtaaaataaggaattaagaattagtacaatattatcatataatcaa

SEQ ID NO: 18693 - DNA, 201 bp, Homo sapiens
ggttcatagcattgcccacagtggcattttctaagttgtggcagataagacagtattgccagatggtctgactacggcatctatcatttttctttcattgrtttctactgaaacagcaacagtgtgactacgatgctatccctttgttgagctcctggcagttaacatcacacaaagtgttaactttcctgaaatttgttg

SEQ ID NO: 18694 - DNA, 201 bp, Homo sapiens
acagaccttctaactgacaaggatgggtctgatttatgtcaaagttcagtttaggaaagaaatggtctctcactcttagggaaagacaaatattttaaagstatgtgattcatacagtaaatattagtatttagttgagttacaaaatggcttccaaatggtccacagctgtttgaaataaagtacaaagttggccagatg

SEQ ID NO: 18695 - DNA, 201 bp, Homo sapiens
cttatttttctttctctgcaggttccagtccgtgaaagataagtagcagagaccaacatcacagcaatacttatgttttatttccttctccatctggtgcmttttaaacaacttagtatgcttctgaaatgggctctccattgtcttacgagtcattagcatttaaaacccccggttggaatcccaaacacaattctgctc

SEQ ID NO: 18696 - DNA, 201 bp, Homo sapiens
acttactaaactaggcaacatatgaaacctacaaaagagaaacatacaaaagagaaagagaaaaatatttgccatcatatatatacaattaaaaagccttscacataattgtaattatatccacattagggagaccagcctcgattctgaatgccagaatgggaaaatgggagtgatttccctttttaacatgacagttga

SEQ ID NO: 18697 - DNA, 201 bp, Homo sapiens
ggcaacattaaggaataaggcaatcctgtctgagatatgtaaaagtgcttccaaaagtaactaaactatataaactttgaaacaaaggaatcaacatgctrtttatggaggagtaataaaggagcataacattatgtgaacgtctcagaaagtctggttcggatggggacaccttctcagcgtctgttctgggatctaaag

SEQ ID NO: 18698 - DNA, 201 bp, Homo sapiens
accatatcggagagtgcacctccagaaattagattctagagagttctagaaaaggtttttactcaatttaagagtagattctattttctcccatgttcctraagtatgaatattttgataattttaattgttattctgatacaactgggaaaaaacacattgaacatatttaagatggctgcatttgaatattatctttgt

SEQ ID NO: 18699 - DNA, 201 bp, Homo sapiens
atgataacttccctgagatggatcagagaggtgatcctgtgaagtcactggccaccatgtaaatctgtcagagactcagcatgtctggtgcttgatattcracaaactggcataacaatgctatattaaaacacataggcatatatatgacctagaatggtgctcctcaaacatggctgcacattagagtcacctggtcag

SEQ ID NO: 18700 - DNA, 201 bp, Homo sapiens
cttccctgagatggatcagagaggtgatcctgtgaagtcactggccaccatgtaaatctgtcagagactcagcatgtctggtgcttgatattcgacaaacyggcataacaatgctatattaaaacacataggcatatatatgacctagaatggtgctcctcaaacatggctgcacattagagtcacctggtcagcttttaa

SEQ ID NO: 18701 - DNA, 201 bp, Homo sapiens
ttctgtgccccaaggctacctatggccatatttttctccttttcacaaccaaactcctccaagtggttggctgtgctggcctgatgcagcctctgcaacckacttccgtgtgctttcctgtcgattagctctcaattagatctccactggccacactgctgaatccagtggatgcttgatgcttgagtctcccccttacct

SEQ ID NO: 18702 - DNA, 201 bp, Homo sapiens
tatttttctccttttcacaaccaaactcctccaagtggttggctgtgctggcctgatgcagcctctgcaacctacttccgtgtgctttcctgtcgattagytctcaattagatctccactggccacactgctgaatccagtggatgcttgatgcttgagtctcccccttacctgattctcactgtgagggccctctctccc

SEQ ID NO: 18703 - DNA, 201 bp, Homo sapiens
tttattgtggtaatcatttcatgacgtacacatatatcaaaacatcacattgtacactttaaatacatacaattttatttgtcaattatacctcaataaarctgcaaaaagagtaatcctcatatttcatcaacgattgagagaaattgggaacaaagtacagaaataaatgaatgcttattcatatggaatattacctag

SEQ ID NO: 18704 - DNA, 201 bp, Homo sapiens
tttatcattttctcctgaactagtttattaggctcagccttaacgaatagaatactttttttttaaaataaataagggtcatacattagtttaattgctgkgatctaatacatactttaaaagtatcatacacattatactatataaagtgaacagttacaatataagtacagttcaatgatgacaataccagacttccaa

SEQ ID NO: 18705 - DNA, 201 bp, Homo sapiens
ggtaaattttagacctctatatagctgtattccagggacagctactgaaagaagagaaagaatataaaatctctaatctcaaaatgggaaattatgtaatragaaaaataagagcaatcttaaagaagatgaggaaaaaaaagaaacataaaatatttgtggcataaacagaaagtaacatacttagaaaaacaagcctat

SEQ ID NO: 18706 - DNA, 201 bp, Homo sapiens
aactgtaatgaagaatgctttaacattttcatcagaggatttttctagcttaaataaatataataatataactcaaataaatgagtaggaggatttgaatyggagacaaggtgaaaaacagtgcatagaattggaatgaagggttacttttcttgagatggaaaatacacttaaacttaacatgaattcgtatgaatgttt

SEQ ID NO: 18707 - DNA, 201 bp, Homo sapiens
atgtttgtggaataagtatataaataattataaatgaataaatgaaggagtgaaacccaaagagatcaaatgacttgaccaaaaccaaagataaaacccayctctcctaattccagtctttgatacttcccactgtgttaagcagctgattcaacattttacatattccataaaaaggattacagttaattaaagatactt

SEQ ID NO: 18708 - DNA, 201 bp, Homo sapiens
attacagttaattaaagatacttaaaaatgcattttcaaatgttgtctacccaaatcaacaatggttttatctagcccattcatgttgccttcagtcacakttactaaaatggttgttgcctcttcttagatgtacatgtaacttctacaatctgatcttctttatgaaataatactaactttcactgatatccttaaagt

SEQ ID NO: 18709 - DNA, 201 bp, Homo sapiens
gtatcaatctgggtaaggatggtgaagtactcaagagggtacctctctttccacagtctcatcattagttcaatgtatcctgtcaccagtggtgttaggtyaggcagacagcttgaataccaaatcaaagcactcttttcctgtgtggagcatggcaagcacaaatgagggagcatatctgtgtcttcagtcctcagatac

SEQ ID NO: 18710 - DNA, 201 bp, Homo sapiens
tgtgattattctggagcctggacaacctacttacagtgggagtgaaagggaagtaaatgtctgtcattgcagaattactgacatttggggttttctgttayaggcagcccaacataatcctaactgatacaccctaacagattataaactttaaaaagctgggagagaatttattttgttcaccattatagccctagtatc

SEQ ID NO: 18711 - DNA, 201 bp, Homo sapiens
tattagcagagagaccatttcaccagtccccaaatatgggcctaacgtttcaaaaataacttgggttttttcattgggtcctaaaaaacatttatgggtayagcaacagtagccatttttatctagagctttacaacgttcatttcattagctaaaaatgttgccacataaattatgctttcacagagtgactgacaaaca

SEQ ID NO: 18712 - DNA, 201 bp, Homo sapiens
agagaccatttcaccagtccccaaatatgggcctaacgtttcaaaaataacttgggttttttcattgggtcctaaaaaacatttatgggtacagcaacagyagccatttttatctagagctttacaacgttcatttcattagctaaaaatgttgccacataaattatgctttcacagagtgactgacaaacatttccatca

SEQ ID NO: 18713 - DNA, 201 bp, Homo sapiens
acttttcccacttaaccattaagtggcatctctcccatgcaatctaactgaggaaggtggtggatgggtgagacactgaggagatgttgaccttaaagacmcagcaaagcctgtggaaccatttctaggccattgtaagcttttaaaattgtgtacaaggggtttaaccacaggagagtaatgaatacatatgttgattat

SEQ ID NO: 18714 - DNA, 201 bp, Homo sapiens
tctctactaaaatacaaaaaattagctgggcatggtggtgcgtgcctgtagtcccagctactcaggaaactaaggcaagggaatcacttgaacccgggagrcagaggttgcagtgagctgagattgcaccactgcactccagtctggcaacagagcgagactgcgtctcaaaaaaaaaaaaaaaaaagcgttaatagaagt

SEQ ID NO: 18715 - DNA, 201 bp, Homo sapiens
atcatacttaatggtgggaaagtgaaagctttcctgctaagatcagaaacaaatcaaggatgtcccctttcactactattattcaacgttgtactgaaagytctacctaatgcaataagacaatgcaagaaaataaagggttgaacagatcggaaaggaagaaataagaccgactctattcataagtgacataattgtcta

SEQ ID NO: 18716 - DNA, 201 bp, Homo sapiens
aataaagggttgaacagatcggaaaggaagaaataagaccgactctattcataagtgacataattgtctatgtagaaaatcccaaagaattaaaaaaaatmtcctggaaataataagtgaatatagcaagtatggaggatataaggctttcctgtataccaggagtgaaaatttggaatttgaaaatttaaaaataccatt

SEQ ID NO: 18717 - DNA, 201 bp, Homo sapiens
agaaaagaaagaaaaataaaaaagtagagtaggatcttttattcaatattaaatagtcttcacatacaattagccatcatgctccagggaatttactctaytgatttgaaaatgtatgttcataccaaaacctgcacacaagtgtttatagcagatttattcataatcagtaaaaaaaagtccttcaatacgtaaatggat

SEQ ID NO: 18718 - DNA, 201 bp, Homo sapiens
ggaagatagaacatgtacaaaatacaaaaccaaacaatatacacacacatacagagtggtgagtgtttgctagaaaaatacatacaagagccacctaaaayagcctcattggccaatgctagaacaatttgagcaaaacactaagtaaaatagttctgaatcataacacaaagtataaaaataaatacccatgagcacatt

SEQ ID NO: 18719 - DNA, 201 bp, Homo sapiens
gacacatatatcatactaatgtaagatgttaaaaataggggaatcttagtctggggtatgtgacaactctctagtattttcacaatatttttttaaatctmaaacttctctaaaataaaaaacttatttttaaaaattgccccagttttactcccaatagtcaagctgtatgctaaccaagagtcaggtatattagttccc

SEQ ID NO: 18720 - DNA, 201 bp, Homo sapiens
gactgtatcttcagggtatgtgtattgcatgaattatgaaagaaggaataaacagcgtaagtcagtataatcaaggttgtaattgttgcttaagacagacygatctggtcctcaaatcctagattacttttctttgtatacttaacttagaatatttaataaagtttccgagaatgccttacttttctaccaggtattaat

SEQ ID NO: 18721 - DNA, 201 bp, Homo sapiens
ggtatgtgtattgcatgaattatgaaagaaggaataaacagcgtaagtcagtataatcaaggttgtaattgttgcttaagacagactgatctggtcctcaratcctagattacttttctttgtatacttaacttagaatatttaataaagtttccgagaatgccttacttttctaccaggtattaatatttgactaataaa

SEQ ID NO: 18722 - DNA, 201 bp, Homo sapiens
actagcagtgccatcagctttttatccctgatgtttatcccatcttgactcacaattcttttcccttttttataggagggtggaaagaggcaatgactcamagttaggtggtatttggaaaaaaaaaaaaagagagagaatctaaaaactcctttgctctccctagtttcaaaccaacatcaaaagaacagggagtaggac

SEQ ID NO: 18723 - DNA, 201 bp, Homo sapiens
ctctccctagtttcaaaccaacatcaaaagaacagggagtaggacagatggccaactccaagcaatgttctttaggtaatatgcttctatagcatactttyttaaaattccaaacaaaattttttgcaggccaaagaaactttagaattttaggtctatcatctttcttctcaatcatctttaaaactagtgaggcttact

SEQ ID NO: 18724 - DNA, 201 bp, Homo sapiens
tcctgggacaagggacaactgtaagggagatacaagaagccttgagggtggaggaaagtcagtagtgtgcaagttggtcctatctgcctggatgtcagtgytctgggatgagggggcagtagacaatggcattgcagagtgaagcaatgactaaaggggaaaaggatggctggttatttaacatccttgagcttgagttcc

SEQ ID NO: 18725 - DNA, 201 bp, Homo sapiens
aagggagatacaagaagccttgagggtggaggaaagtcagtagtgtgcaagttggtcctatctgcctggatgtcagtgctctgggatgagggggcagtagrcaatggcattgcagagtgaagcaatgactaaaggggaaaaggatggctggttatttaacatccttgagcttgagttcctaaaatgtaagatgggacatca

SEQ ID NO: 18726 - DNA, 201 bp, Homo sapiens
gtagagagtaaggccaggtgctgtggctcatgcttgtaatcccagcacttcgtgaggctgaggtgggtggatcatctgaggtcaggagttcaaagccagcytgggcaacatagcaaaactccatctctactaaaaataccaagttagtggggtgtggtggcacgtgcctgtagtcccagctactcaggaggctgaggcacg

SEQ ID NO: 18727 - DNA, 201 bp, Homo sapiens
agcccctgctttgctctgcaattgtctaagcttttaagggtatcttgtccttgaagtcagatggatttcattagaaattgacccactttctttaagaacayagccaatgtcactataattttgaaaaaatgttaaaaaggtaagttcaagttcaacacaaagaagaccttttaacaatagacaaactggaatggtttgctg

SEQ ID NO: 18728 - DNA, 201 bp, Homo sapiens
ggagcaaggcacacagagctagactctgggtttacaatgacagagtttaagttcccatctgaagtccccacattctgctcaacacatgactctccattacygagctcactatcaccagcaggctgtgagcctcagacaggaggtcttgccttaaactctctggcctcagttttcttaccagtaaatggcctaaaggacttt

SEQ ID NO: 18729 - DNA, 201 bp, Homo sapiens
ttactatgagaattatcaggaaacattaggtttcctctgtaaacataagactaaattttatgctcagataaatacttttcattacattaagaaagtatccyttgaatactattttattaaattttaaaaatagaaaatgagtgtggaattttgtcagatacactgatatatatttatcatgtaatttatgtgaaatcaaca

SEQ ID NO: 18730 - DNA, 201 bp, Homo sapiens
gaataaatctttcttattcaggatggattcttctaatttttgttttttcatattttatttaagtttttgtgttggtatttattagtgagcctgttctttarttttatttttgtgtgtaattcctgtcaatttttagtatcaatattatactcacttcatacaagaaaggttgcagttttactttttcccctgatgttttga

SEQ ID NO: 18731 - DNA, 201 bp, Homo sapiens
ctgaaatgtcattgtgcagttcatgactgtatttcatacattctgaaaggccacatttcattttcctatttttttaaagtctccaaccagatagaacatayaatagaataccccatttataatagcaaaatgaaatacacctagtaataagtaactagtaataaatttaacaacaaatgtgtaagatatataagaaaactt

SEQ ID NO: 18732 - DNA, 201 bp, Homo sapiens
ctgaaggtcacaaaagaagacttgaagaaatggaaatacgtgacatgcacttgaagaaaagaactcaatatcattaagatgtcaattttctataggttagyttagaaatacaaagaaatacctatagaatactaccaggatatttttgtttttatttgtttcatagggttgggcaagttgtcctaaagtaaaaatacaaaa

SEQ ID NO: 18733 - DNA, 201 bp, Homo sapiens
atattagtataggaataaaaagactacagaatagaaaatctggaaataggatcaactgtacatttgaattttctacataatagaaataaatcatcatccaytggatccaaatcaatgaattaaggagggattactcaatgcatgtcattgatttaataagtgaatcaagtaaaaaaaaatcaaattgtatccatacctcct

SEQ ID NO: 18734 - DNA, 201 bp, Homo sapiens
aggttgaaaatgagagtagtgtgggtgacatagatgtgtcagtcccctaaatagggtgatggaaactctggggctggttgagatcctggggatgcagaacsttgggtggtgttcacacttaagactggcagatgaggtggggccagtgagatgtcatagagccagaatcacagccaagtccaacaggatcttagagatcgg

SEQ ID NO: 18735 - DNA, 201 bp, Homo sapiens
tgatggtatctagggattcaaagaaggaaaagggcaggccacctttgaagtatggggtgataaagagaggaaagatggagcaaatacgtgagacactagcratctttaggaacagcgctgagttgtcttttaagaaaataaaagacctaaacacatttttaggtagaaggaattcaacccaaagcaagagacaaaatattt

SEQ ID NO: 18736 - DNA, 201 bp, Homo sapiens
ttcaaagaaggaaaagggcaggccacctttgaagtatggggtgataaagagaggaaagatggagcaaatacgtgagacactagcaatctttaggaacagcrctgagttgtcttttaagaaaataaaagacctaaacacatttttaggtagaaggaattcaacccaaagcaagagacaaaatatttaaaatacagagacata

SEQ ID NO: 18737 - DNA, 201 bp, Homo sapiens
ttgccgtggcagagcctgggctctgtgtttctagcaaacagtgtctcactgagaagtatgatattctaatgtttttatttacacattttggtcagctactsgcatcacccggtttctactacctagtacattttctaaagcattcgtattcatagcatgctacagatgaaattagacaatgagactgatattgtgtgagag

SEQ ID NO: 18738 - DNA, 201 bp, Homo sapiens
ttcaaaacttcaccctcaagatacaactgagcattggactggactttaaaactgtttaaggtgaaacgtgaaagctaaaaagaagattgaagtgtaaatgyatgaagaggcgaattcaaagtatgtttgcttcttagtgagcaggtgaaaatgagagcttccctcagtagtagacaggaaggcattcacttccatctatga

SEQ ID NO: 18739 - DNA, 201 bp, Homo sapiens
gtgagcaggtgaaaatgagagcttccctcagtagtagacaggaaggcattcacttccatctatgaactagatgtattattgttaggtaagttaaaaataargatcactttttaactgaatataaaaaccgtttccaagtaaaatggattgccctttagcttattggaaacttgattcccaagaatgcctctgttgttttta

SEQ ID NO: 18740 - DNA, 201 bp, Homo sapiens
aatataaaaaccgtttccaagtaaaatggattgccctttagcttattggaaacttgattcccaagaatgcctctgttgtttttaactgtgttcaaaatcayatccaattgcactcgtgtgctttgaaataatagtgcaagggccttaattcaatgtttttctgaaagttgaaaagttgccatgccatgcgacaatgggtca

SEQ ID NO: 18741 - DNA, 201 bp, Homo sapiens
gtaattaaagagggatttgtttcacatctagattctttcaaaaagagacttgaaggagtagttaataaatatcagacttttagttctctcctttttattcyttttttcagtattagtaagattcaagtgttcacataactttgattcaccaaattgcattgcttcctacgtttggctatgtcaaaaagtgggataaaatct

SEQ ID NO: 18742 - DNA, 201 bp, Homo sapiens
cacccaacataaaagggggatggctctgcctctgagcccctggaaataggtaatgaatgtgtcattccttgagctggccatcagaatataccatattagcwcaacattaaaaaaaatcctggcccggtgcagtggctcacgcctgtaatcccagcactttggatggctgaagagggcagatcatgaggtcaggagactgag

SEQ ID NO: 18743 - DNA, 201 bp, Homo sapiens
tcttaaaatattaaccctggagataataataaaaatattcctaattttatttgccttctagtatcaccattgacggtttgaaataaaagggcatttacacsttgcattataaaatatcttcctagcaatggaaagttctataagcaaattcacctatataaaaatgccctgcctttcccagatgatgatcatcattttctc

SEQ ID NO: 18744 - DNA, 201 bp, Homo sapiens
gcattataaaatatcttcctagcaatggaaagttctataagcaaattcacctatataaaaatgccctgcctttcccagatgatgatcatcattttctccarttaccactcacaccctactctataaacatttttatttcattttaaagtgaaattcaatgtacctgtcctacaacttttctatctggatggcagaatttaa

SEQ ID NO: 18745 - DNA, 201 bp, Homo sapiens
taaaaatgccctgcctttcccagatgatgatcatcattttctccaattaccactcacaccctactctataaacatttttatttcattttaaagtgaaattsaatgtacctgtcctacaacttttctatctggatggcagaatttaataatttggatgtagaattcctggatactacaaaataaattaacgtgtcagaaaat

SEQ ID NO: 18746 - DNA, 201 bp, Homo sapiens
tgtacctgtcctacaacttttctatctggatggcagaatttaataatttggatgtagaattcctggatactacaaaataaattaacgtgtcagaaaatcaraaacctgtgaagatagtgtttttaggacacgtccaggagggcataatccatgtatcacaagttcatgtcaaccacaggcatgacaggaactcattgtaaa

SEQ ID NO: 18747 - DNA, 201 bp, Homo sapiens
tctgccactttttcatagatggctgtagaagtgggatttcatttaaatggaagtcttttttttttaacacatcctacatacatgagtcagtaacaattgtkgttgaaccgtgaatgtaattttcatgaatgataaatcctgtttgccctcttaccttggatatttctacattttttttttaattctactagtgacttggca

SEQ ID NO: 18748 - DNA, 201 bp, Homo sapiens
atcctacatacatgagtcagtaacaattgttgttgaaccgtgaatgtaattttcatgaatgataaatcctgtttgccctcttaccttggatatttctacawtttttttttaattctactagtgacttggcaatccatcaaaagattggctagttcttgattgtgtctatggaaaaaaattttttaattaaagtttttcatg

SEQ ID NO: 18749 - DNA, 201 bp, Homo sapiens
ctgtgtcttgaccttgggaaatcagttgtatctccaaggctccacgttgcaaattgactatttctattcttatgtattaagcatctattaaacggaggtgyttgtacaaatgtaatcttgtagtttactctctgaggtaggcaatatcattccctttaaaggaaatcaaggctctgagaggtccagtaccttggctgaggt

SEQ ID NO: 18750 - DNA, 201 bp, Homo sapiens
gccttctttaatggtagctcctaggcctacttataggacagagtggttgtaaaaatctaacacgatcatgtacatgaaagttctttgtaagtggtaaagakctgtaaggtacaggctaacataatcatttctcagctatactttcccgctttctactaactggctagcaattgtataaacttcttattctttagcagggaa

SEQ ID NO: 18751 - DNA, 201 bp, Homo sapiens
tgctctgaaatctgaaactttttgagtgctgaaacaacgctcaaaggaaatgctcctggaacattttggattccggattttcagattagggatattcaacmtgaaccactattctaactgtagttaaaggaataatatgagaaaagctaaatatccatactgaagtgaggatctgaggctatcagctggaaaattcacact

SEQ ID NO: 18752 - DNA, 201 bp, Homo sapiens
gttaaaggaataatatgagaaaagctaaatatccatactgaagtgaggatctgaggctatcagctggaaaattcacactccagggaaaacacatgagtgartgttattagctgaaattacaaaactgtttgcctattttgatctgtttcaacaaatatattttcaatgctttttttttttagttggactctaagatagtgc

SEQ ID NO: 18753 - DNA, 201 bp, Homo sapiens
acaaaatggctttttaaaatgtatgcctggcatttatataatacaacctctatacacacaagtagatgaatacatataataccttattttgtacagcaagrtaaaaacatacatatgaaacattctagacatctatataataatatcgaagtgtagaagatgagtagccaaaaaaaatcataactgaatacatcaactagc

SEQ ID NO: 18754 - DNA, 201 bp, Homo sapiens
tgaacctacacagaagatttgatttactttaaattgaaaaaatgctcatacaatatgacaatttcaaaaatgtactttcagtagctggtgacaccatctaktcatgtcatgtgagtgtatttcttagggcaagggacctgcaaggcaagactatataggccataatttaatcactgcaaataaagaaagtctaggaatgac

SEQ ID NO: 18755 - DNA, 201 bp, Homo sapiens
attacttattttagtacaacacattaaaatcaaatatctcctgtagcaaaacgattcaagtccatggaactcaaataattttctaataaaaaatgcatgaracaaataaatgcactttatgttccacaagaaaaggcagtttcaacaggctaatgctcagagaaaattcattttatcaaccagccatttcattctttggtg

SEQ ID NO: 18756 - DNA, 201 bp, Homo sapiens
acaagttgaaatgtaaaaatacaatagagagaatacactgcaagctttaaagtagcctggacagactttacaaaaaggtataggtatagtagtgacattcstgtgtccaagttttatagaataagattgggaatgcaccatggatatcttccacattgttgtccaatgggaaaggtgttgtatattaacatagtattattt

SEQ ID NO: 18757 - DNA, 201 bp, Homo sapiens
aataatgtcaaacctggaggcatctcaaaatctagaacttaggtaccgcctactttgcatttggcatcatggaacttttataataaagatgaatcttatamgttttctggaaaaatgagttagttgatcatgtcattttgccaaaaatgggatataaatctttctgtttctggtcacctggattatttaaattcatgtttc

SEQ ID NO: 18758 - DNA, 201 bp, Homo sapiens
tttattgaatggatgaatgaaaataaaatagccaaatctgaatgtatggggagagcacgctgcagagggaatagaacatggctcagggaatgcatcttgtyctcattcttgtttgtccatgaattggctgtataaccatttaactttccagtactggggctcttccccctctgtagaatggcacgatctgtagagtggtac

SEQ ID NO: 18759 - DNA, 201 bp, Homo sapiens
aaaataaaatagccaaatctgaatgtatggggagagcacgctgcagagggaatagaacatggctcagggaatgcatcttgtcctcattcttgtttgtccaygaattggctgtataaccatttaactttccagtactggggctcttccccctctgtagaatggcacgatctgtagagtggtacgatcttggctcactgcaag

SEQ ID NO: 18760 - DNA, 201 bp, Homo sapiens
atgcatcttgtcctcattcttgtttgtccatgaattggctgtataaccatttaactttccagtactggggctcttccccctctgtagaatggcacgatctrtagagtggtacgatcttggctcactgcaagctccacctcccaggttcaagtgattctcccgcctcagcctcctgagtagctgggactacaggcgcgcgcc

SEQ ID NO: 18761 - DNA, 201 bp, Homo sapiens
cggggttttaccatgttggcgaggatggtcccaatctcttgccctcatgatctacccgctttggcctccaaaagtgctgggattacaggtgtgagccaccrtgcctggcccaacatatctatactatacaaaagtagatcattggcccttgaataatatgaaattaatttatttcactcccacagaggaacaattatattc

SEQ ID NO: 18762 - DNA, 201 bp, Homo sapiens
aaagtgaattagcttaaaaagaagcaccaggaatgttgttttcaagcatgaaggcacatacaattttttaggatcagaggcagaattggaccccacatccrccctcctagtccagtatcagtgaggctgtctcatagaccattagactattatttcaagttggtttaattaatgccaacttagaataaaactagtggcaat

SEQ ID NO: 18763 - DNA, 201 bp, Homo sapiens
attggtacagtaatacacaaatttgaatcaggaacttttgaagttattgcaatagtctaggaatccatatgcaaatcgtaaaaatatatagttgtatttgwcaaatgtttttcaagcctacacaaatattattgagattcatacaatccaaatagatttaatagcattaccaactactttggattttccgcattttttttt

SEQ ID NO: 18764 - DNA, 201 bp, Homo sapiens
aataccttggacctggagagattgttagaaatgtctagatacttcaatggcactacttgaagcaaaatgaaaatatctacatataattggaaatatctagytttaccccaaactttattccaattccatactatttcttattgttatatgtatatgtatgtatatatgcatatactgtatatctaatacatatgtatttct

SEQ ID NO: 18765 - DNA, 201 bp, Homo sapiens
caataatgggaatgtggtaaatggcggagaccccaactcctggtcttcagttagagctgcagaacccttgtctgttgtacagcctgttgctacctgaggcrctaacgctgtcttccttgcagaagactggtataatttaaattactgggtttttgacaaagagctgacatttttcattagctggaaagctaatgtctttaa

SEQ ID NO: 18766 - DNA, 201 bp, Homo sapiens
agttcaccacctgccagctgtccatccctgtgctctgcatctttgtcccatggtccttctgcgtaagatgagaatcgcacctcccacctcctggtgtgatygtggggatgaagaagaaaactgtgtgtaaaacacctagcccaggacttggcaagagtcggagcccaataaatgtcagttgattggttgttagaacgtccc

SEQ ID NO: 18767 - DNA, 201 bp, Homo sapiens
tacttttattctatgtgaaaaatagttacgtgatcatagcctattttccttttcctgttaacttttcaagcactatatatatatatatacacacacatcayaatagaaaaaatacttcaaaatgctaataattttgtctcttgatagccttaataatacagcgtttttagcaataaactttatgaatccactgtcttgaga

SEQ ID NO: 18768 - DNA, 201 bp, Homo sapiens
gttagaaatgatcagtagtaagttgattaagtattaagactataaagttagatctatgtttagggctcaaattcatttaggtcttttgaaagcattatagmattttagacaccatgataaatgacattgtactttctataaaactggaatatttgtatcattttagaagactaaacaactgcttagaagtgtcagcccaaa

SEQ ID NO: 18769 - DNA, 201 bp, Homo sapiens
aggcctgttttcatttattgtttattccttctttccagtcctatgtcttctttatccaggttctgtgctgctttccccaaactgccccctcaacacattaygaaacattctactaacaattttgaagttataactaatgactgaaagctcatggctaggatctggaaattcttacttatggacatacttagaatccctttg

SEQ ID NO: 18770 - DNA, 201 bp, Homo sapiens
tcattgtaaattttctataatgcgtcattaggaagcacactctacaaaaagcccaggttctaaacgaatcctttctttgaggccattctaaaactttgcayggtttttctttgtatgaaagagcttctgttgactgcacaaagaacaagcaatcaccacatataggccaggctgagagtctgggatgactttatacaaggt

SEQ ID NO: 18771 - DNA, 201 bp, Homo sapiens
aaaacactatccatccacacaaagcaatatcacttttttttaatggcaggattacattttccagtcaaaagaaattatctatccagtaggttcttataackgattaaactttgaaggggggtggggggtgcagttaaaacactgagacagccaaagccatggcaagaaaaattactaagtaactaaaatgacaaacccggt

SEQ ID NO: 18772 - DNA, 201 bp, Homo sapiens
tatatacaataaataatataaaagaacttaagtatttttcacttccttgatccattcgaatactaaaatgtcatcatgtgaaaatactaatacaaagatayaatcacagtactaacagcaaaaggctcagctttgatcacattcaagagcttttagaaaatataattagagaaagttgatcctacacataaattttcccag

SEQ ID NO: 18773 - DNA, 201 bp, Homo sapiens
ataaataatataaaagaacttaagtatttttcacttccttgatccattcgaatactaaaatgtcatcatgtgaaaatactaatacaaagatacaatcacartactaacagcaaaaggctcagctttgatcacattcaagagcttttagaaaatataattagagaaagttgatcctacacataaattttcccaggatggctt

SEQ ID NO: 18774 - DNA, 201 bp, Homo sapiens
cattgggataacgggcgccagcggctttccataaccccagcctcttaccgctgctatctacacagggtcctattgccagaaggattttcctacaacactgmtttcgtaatacttttgcccttgagtaaaaaccaccagcgattgcttctaacctgtcctaacatgcccaagttctttaggtggttgttgaaggttttggtc

SEQ ID NO: 18775 - DNA, 201 bp, Homo sapiens
aacattgagaccatggtaagcattcaaaatatatacactgaggaatggcattctagtcgtgtgggagctcaaaacaagaactgaagaggctctttgtttcwcacaggaattagtagacaaaagatagctcctgattcttccaactttattagatttctattgcaactttatagtgtatcagactctggcttctggaatcca

SEQ ID NO: 18776 - DNA, 201 bp, Homo sapiens
tttatttttccaaaaagctgaactcaaacagatttcaaagttcccattaaaattttccagagttttaatctagctgaatacctctttcatgggaattgtayggaaggaaggcaatttataaaattaacgtttgatcaaacatgtttcacggggctccctactgctcagatcatgggatgtaataaaaacgaattccagaag

SEQ ID NO: 18777 - DNA, 201 bp, Homo sapiens
gtcttctagatttaagaaaattttctctcttcagctatatgtaatttacagcaatttggtaaagtataattttataaacaaagataaaaatgttttattayattacttaattcctccagaattcaaaaactgtgagtgttcttatggcgatatggttatttgcataagtccaataaaaatctctctatactaggaaaaaaa

SEQ ID NO: 18778 - DNA, 201 bp, Homo sapiens
tcaaaaactgtgagtgttcttatggcgatatggttatttgcataagtccaataaaaatctctctatactaggaaaaaaaagacacagtttgttataaagayagtgaattagaagagagaaatgggaacttaggctctcaataaagaacagtatatttgaagtgtcaaactaagtgatatcagagtgtaaacaaaaagaatt

SEQ ID NO: 18779 - DNA, 201 bp, Homo sapiens
ggacctgggctgggggaccctgaggtcagggtttgccagctgaggctttgaggattcagggattactggaaccctgggctaagcacctgaagcagatcaartgagggtggggcagggtagccctaatactatctgcctctctctccacatacttccaggaaagtccttagtgtttacatgcagggctttctcccgccataa

SEQ ID NO: 18780 - DNA, 201 bp, Homo sapiens
ttttttatagtaaaaatgggcaaaactgcttctacttaacataatgacatattgaaaatttagtgtttctttagaacaatctttaagcaccttggaaatgsaactagcatagacaggtgacattattcaacacattactattcttaaattgaagtattatacttattttggagggcattctttagtgacaggtttattatg

SEQ ID NO: 18781 - DNA, 201 bp, Homo sapiens
gttacttctgaaatttctgccaaaaggaactaatccaaaaggaattggtttaatttacagttcaaatttatgtcacaatcaacatggagacgttatggccsacagtaaagataccttttttttttgaaagtattctaaaaatatactttctaggccctttttgtcatacctcatttatactctaacctggagaattttctc

SEQ ID NO: 18782 - DNA, 201 bp, Homo sapiens
tgctcatctggcttcctttcagtagcccactcactttctcccacaaactcttaacgggacaaagttcaggaggcattaagcaacaaggtgcctttagccasggtttggaaacacaaagaaatcttgaattgctggttccaattctaaccacagtaagaaaaaagttaaatgatgtttcaattaaagcactgagtgaccagc

SEQ ID NO: 18783 - DNA, 201 bp, Homo sapiens
catgggatttgggttacgaacgttacgttttgttgaaaatggccccaaccattgataattaaagctatttgtgacacgtgtagcttataatgattaaatcrtctacagtcagaagcacaaatatcctgcacctgtaaagactttatttcctaaaggtaaaacaactgtttaggaaagatcatgctggcaaaacagctgcct

SEQ ID NO: 18784 - DNA, 201 bp, Homo sapiens
aatacacgaaggcacagctcggtgcattctgagtttagctctcaaaaaagaaaaagtgcagagttttcataatagactaaaactggcatcatcataatagycttctgattaagaaaaatttaactttataataatatttgaaaagagcatgtgtcactacaaccatggctaagaatgataataacaataaaaatacacagg

SEQ ID NO: 18785 - DNA, 201 bp, Homo sapiens
taagtgacttaccccaggttgcttttccattgaacaggtgaactcttttttttttttttgagatggagtttcactctgtcacccaggctgagtgaaatggygcgatcgcagctcactgcaatctccgcctcccaggttcaagtgattctcctgcctcagcctcctgagtagctgggactacaggtgcccaccaccacgccc

SEQ ID NO: 18786 - DNA, 201 bp, Homo sapiens
attacctacattttacgaaagaagatacaaaggcacagataagttaagctagatgcttcaagctacatagcttgtgagaggtagggctgggatgcaaaccsaggacccctggctttttagccacccatgcacttcaccaccagagcatatcaatatattctgaatcataatgataagttagctatcaattctgaaaataac

SEQ ID NO: 18787 - DNA, 201 bp, Homo sapiens
taagtgtcgtgaggagctgtcaacctagtatttggcctggcagaaaactgagagagggaattatggttaattctataggtcaacttgactaggccatgggmtgcccaggtatttggtcaaacattcttctgggtgtgtccatgagggtgtttctgagcgagaataacatgtgaattgacagactgggtaaagcagattgct

SEQ ID NO: 18788 - DNA, 201 bp, Homo sapiens
tcactccatctttgttctgctttcattatattaaagagtcatcgattctattttaattccatatgcaaagacagaaacaaacttatgaaacagtgataaayagaagaaacaagaattgcctatatcatgaaagcattactccatttgaaagaaaaaaatgcaagtttctagaaaacttcattaaccctaaactttcagtac

SEQ ID NO: 18789 - DNA, 201 bp, Homo sapiens
taatgattaaagctgtaaaactataccgtatagttgaaattcagcacagtttcaaatgattggttcagaacactcctctgacttttcatgttttagacaawttttttctgaatccatctacgaaggaaaaatttgagaagtgcattcaaacttgctgccgaaactcacttatttccacatcctatcagctctcacctcatt

SEQ ID NO: 18790 - DNA, 201 bp, Homo sapiens
aactcacttatttccacatcctatcagctctcacctcatttaccacagtacctaaattcaacatagatgtggaatgaaaagtatgaaagtaattacttttkgggggttggaccttttattgctgctatttctttttaagcacagtgaatatttttcagtatctgatagatgcatagagaaaaaagtaagaatatttttcta

SEQ ID NO: 18791 - DNA, 201 bp, Homo sapiens
ttcctatattgaactatgagcattttgagggcagagaccgtcctaacttacatttctatctctagcacttagcataggcttagcacattttatttagtcawtgacattaaatgaatcacataaatccagggcaatactgtcacaactaaaagtatttcagagatctcaccattccattattctgcagtaacatttattcca

SEQ ID NO: 18792 - DNA, 201 bp, Homo sapiens
ccggcatgcaccaccattaccaactaatttttgtatttttggtagagatgggatttcaccataatggccaggctggtcttgaactcctgaccttaggtgayccacctgccttggcctcccaaagtgctgggattacaggcgtgagccaccatgcgcagcctacatattattttttatctttatgtaaatgcagttatacct

SEQ ID NO: 18793 - DNA, 201 bp, Homo sapiens
caatgttgccttttcttcagtgctaataggaccttcctcagaaagtgatatagtacctattccccattctacataatgcaggcaacaaagctctttagacrcacgacaggaaatatgccacgtctaatatttaaaattcatattttacaggatcccattatattctattttcgggcaatgaacctgcatttgtaacaatcc

SEQ ID NO: 18794 - DNA, 201 bp, Homo sapiens
tcagtgctaataggaccttcctcagaaagtgatatagtacctattccccattctacataatgcaggcaacaaagctctttagacgcacgacaggaaatatrccacgtctaatatttaaaattcatattttacaggatcccattatattctattttcgggcaatgaacctgcatttgtaacaatccatttgtattagtggtt

SEQ ID NO: 18795 - DNA, 201 bp, Homo sapiens
tacatgtaattcacagtatgcattattttttaagtagtcttactagatagcaggcaggaattataaattgttcagatataaatatatgtataaagttgtayatatacacacattataatttatgtttacctatatgtagattttacagatatatattattatatatacttacagagaaatgtatatgtatatatgtgtgtg

SEQ ID NO: 18796 - DNA, 201 bp, Homo sapiens
tctactaaaaatacaaaaattagccaggcgtgatggcgtgtgcctgtagtcccagcttctcaggaggctgaggcaagagaatcgcttgaacctgggacacrgaggttgcagtgagccgggattgcaccactgcactctagcctggagacagagtgagactccgtctaataaaaaaaaaaaatgaagtttgccacatctact

SEQ ID NO: 18797 - DNA, 201 bp, Homo sapiens
ctatctgaagaaaccactctctttgcttatccatatgaagactcctcatccattaaaattttatcataagattgcagcaattcagtcgcatgtttaggctytacttctaattttggttatcttgctatttctaccacatctacagttgctgcttctatggaagtcttgaatccctcaaagtcatccatgagagttggaatc

SEQ ID NO: 18798 - DNA, 201 bp, Homo sapiens
tataatcttacaaaatgtatttctgaaataataagacttggaagtcaaaattttactcctcgatccatgggttgcagaatggatgttatgctagcaggcaygaaaacaacattcatctccttgtacatttccaccagagcctttgggtgactaggtgccttgttagtagtggttgggaaggaatctcattttctaagcagt

SEQ ID NO: 18799 - DNA, 201 bp, Homo sapiens
gtactgtcatccagctagagtagactgagcacagttcttaaaggctctagattttcagaatggtaaatgaacactggcttcaactgcaaatcaccagctgyattaacccctaacaatggagtcagcctgtcctttgaagccaggcatcaacttctcctctctagctctcagtcttagatggcatcttcttccaataaaagg

SEQ ID NO: 18800 - DNA, 201 bp, Homo sapiens
catttccaaatatccccaatagtctttctaggttagtgaccaggaatgtttgcaagtaactaaatttatatcatttggatgaaaattccatttgtgtttcrggctatgttgatacagaacaaaggagagtagacacttggcaattatcctgttaatttgatgaatgtggatggctgtccggccttaccagatatttcaaac

SEQ ID NO: 18801 - DNA, 201 bp, Homo sapiens
ttcaaaccaacaaatagaattctttttgtctcagtgatctaatttgttaaccagataactgccaagactgcaacttcattctgttctgtataaaattattygtaatttttcaatatttccagaatcagctgcttaagggaaatatatgtaaatatatggatatttttgcattcaagctatatttctcactccatattgatg

SEQ ID NO: 18802 - DNA, 201 bp, Homo sapiens
ctgtaaaatggggagacaatagtgcctatctcatgggtcattgtgagcatagaaagttggtacatacaaactgcgtaagatagagctcagactatagtaarcactcaacaaatgcaactattatctttacattaactttatcatttaaaagatccaggaaggaccttttggggatgatgaaaatgttctaaaaatggattt

SEQ ID NO: 18803 - DNA, 201 bp, Homo sapiens
ttgggtttgcaatgtacacatggaagcaatttggcctgtaggttgaaaagctcccttcactgcaaatgaatgacttggtttattccatatgtgtccctgamatccagagcctgtactagggtgaggcatatttgcctgaggagaaaaacttaaggtaaaggactgactagtcaagataaattatattttagtaccatattt

SEQ ID NO: 18804 - DNA, 201 bp, Homo sapiens
taccatatgacctagtaatttaacctctgggtatataatcaaaagaattgaaaactgagtctatatagactatggacataactatggtccatatttgactrtggacatctatatattatatagatatatatcttctatctatatatgttataactatctatataatatacatatatattatactcatgtccatagtctata

SEQ ID NO: 18805 - DNA, 201 bp, Homo sapiens
agcaactcaaatatccaacaactgatgagtggataaacaaaaggtagcatatatacacaagggaatattattcagtcttcaaaaggaaattctaacacatrctacaacttggatgaaccttgagaacactatgataagtgaaataagccagatacagaaaataaaaaataaaagacaaatactgtatgattccacttgcat

SEQ ID NO: 18806 - DNA, 201 bp, Homo sapiens
aaataagccagatacagaaaataaaaaataaaagacaaatactgtatgattccacttgcatgaggcacctagagtagtcaatatttatacagacagaaagkagaatggcagttgtcaggggctaggaggtagaaaagggaatggggagtcattgtttgactttcagttttgcaagatgaaacatgtactggagattggtta

SEQ ID NO: 18807 - DNA, 201 bp, Homo sapiens
aaaagacaaatactgtatgattccacttgcatgaggcacctagagtagtcaatatttatacagacagaaagtagaatggcagttgtcaggggctaggaggkagaaaagggaatggggagtcattgtttgactttcagttttgcaagatgaaacatgtactggagattggttacacaacagtgtgaatatatgtaatacact

SEQ ID NO: 18808 - DNA, 201 bp, Homo sapiens
tttgggcttttccaggtatggacaaattggaaatttgcaagaaacctcccatttttaaaacctccatttcttcaacttgcaagagcaccaagggccttatragggtccatcaatagtaataaatctcataatgagcaaaaaattatcagtgttgatctataatttatgtgctctgattattgttcaaatattaatccttac

SEQ ID NO: 18809 - DNA, 201 bp, Homo sapiens
caggaagtgattggagggatgtgttttatatcttttttaatttaagctcaaagagcaatttgaattatgtatcctattttatttcttactgttaaacccasacattgaaatgtatatccagggccttttaggaatacaaagtaaaagcaatgtcacgtattgtgctccagcaggtaattcagtgttttaggattagccaag

SEQ ID NO: 18810 - DNA, 201 bp, Homo sapiens
tggagtaacagaatgccaattgtcacacactggccttccccccagcactgtgaggagaaaggaagcaaatgcaggtggccaaatgcagggacaacagatgycactccctcagagaaatggcgtgctaggaaataaaccttttctgcatcttttttttggttttggtcaagacatggagtagaatttgcattcattaagtta

SEQ ID NO: 18811 - DNA, 201 bp, Homo sapiens
aactagttgaaagtaatacaggaatccaatccaggtcttctgactcccagggtctaagtgagtccattaccattttgcagtttgattaataacagcaggtraatgcaaacttcagatgaaaaaatactatctataaagtaaacattggatgaacagtcacctgtaactgtaaatgatgaactaaggtcacaatttcaccat

SEQ ID NO: 18812 - DNA, 201 bp, Homo sapiens
cagcaggtaaatgcaaacttcagatgaaaaaatactatctataaagtaaacattggatgaacagtcacctgtaactgtaaatgatgaactaaggtcacaayttcaccattgcaaagactgaaaggacacaactcttaaaaactcaaaagaatgaacaaggctgccaaaaaagcacagatttcggcagataaaaataggttt

SEQ ID NO: 18813 - DNA, 201 bp, Homo sapiens
acaaacacaaaaatcagccgggtgtggtggcatgcacctgtaatcccagctacttgggaggctgaggcaggagaatcgcttgaacctatgaggtggaggtkgcagggagccgagatcacgccactgcactccagcctgggtgacagagcgagactctatctcaaaaaaaaaaaaactttagaaaacataaactcttttagc

SEQ ID NO: 18814 - DNA, 201 bp, Homo sapiens
ctacagtgcagaattaatgtggaacaggagagaaggggagagggttgggatgagggagtccgcagcaagcatcccagaggtctgcaggtttgcatgcatgygcaacccattgtcaggaatctctgtgctggtcagcaggtcagcctgtgacaacagaattggggcaggcactcacctacctaggtgctgagggcatccttc

SEQ ID NO: 18815 - DNA, 201 bp, Homo sapiens
caggaatctctgtgctggtcagcaggtcagcctgtgacaacagaattggggcaggcactcacctacctaggtgctgagggcatccttccatcttctgctcscacaatgtgggccacagttaggctaaatgtgtcccttgtccatttccttcagagcaaatgctgtattttatcacctttagctcctcaaaaacagttcctt

SEQ ID NO: 18816 - DNA, 201 bp, Homo sapiens
gacggcaccctattagctttctgttcacttcagtcaacttccttctcatggtctatcctcttccatatcgtgatgccttccttccatgtatcatccatctyacatcattgtgtatatcacactaagtgtcaataaagtgttcacgcagcagtctgccctattagactatgagctcatcagtgtcaatgaacatgtccttat

SEQ ID NO: 18817 - DNA, 201 bp, Homo sapiens
aatcccaaatttcttttgattttattcttaagagagcaaactgcaaacactcaatgaactacaatgccctaaaaagcagaacagagattgcaaaatgacartcatcttatttcattttcatgtcaccatgaatgttacttattatttatatcaaattgagctaatgcatggagcacacaggcactgtttatcaagatctct

SEQ ID NO: 18818 - DNA, 201 bp, Homo sapiens
caagcaaataagtaaccaagtaatttaataatgaatgaaaaaataaatgaggccaatgcccctttcctataactttatctttttctttgtgtcccttaatraggcaataccttttcctgtacctttatgttgttttgatagttttggtactttttgtactaaattatatcagtgagccctacttagagaaaaatatgctat

SEQ ID NO: 18819 - DNA, 201 bp, Homo sapiens
atcttacaaaaaataccaaggtaaggctatctccaacacaaaacacacctaagggagacactgccttttcctccaaatactctcaggtagacatcagaaarctgtagcagtctatgaggaaaggtgagtattcacaaatagatttgatgacaactagaacaggtgggggcttactgtgaaagttatcgtgaagatgtgagc

SEQ ID NO: 18820 - DNA, 201 bp, Homo sapiens
aacttaatctcaaacaataggataggtatgagtgcaaaacattgagtttcctaaactctctgaatttttccaagagaacacactccaaaatcaccagttastaattcattttattaattcagttcaatctgttacttcctagaactaccaaatgctttctttggcatcatgtttataaccaaaatgtttactttaaaatta

SEQ ID NO: 18821 - DNA, 201 bp, Homo sapiens
atcatgtttataaccaaaatgtttactttaaaattaaaacatttgttttagtgaaaagagtttccaaaagtaactgaaagtcccaataactggaaagaaaytaaatgcaaattgttttttggttatagtttttcgcacttcttcttagtagccagactagtgcaaaggaagaaacaaaatatttgtgcttttgagattata

SEQ ID NO: 18822 - DNA, 201 bp, Homo sapiens
gtacccttttaaaatacatcatgtctttttaggggtagaatttgatctaaagaaatctactatgtacagggtaaaagaggaggaaatcctttggaggaaayaaaaagaatagatgtgtatattcagttcttacagataatagctgaaggggttataaaataaagcttaatcaaattgattggcagcaagggagaagtgata

SEQ ID NO: 18823 - DNA, 201 bp, Homo sapiens
gatcaaaaatatacacgcatacacattaaagagatcaaacccactgcaaatgaatcttctgtcacatatcatgactctcataataaaaatccaggacattmaagaaaataaataaacagttcaagaattaaatttaagccaggcaattcagttatgaaatttaaaggtgctttcttatctcaattgtatctctgatttact

SEQ ID NO: 18824 - DNA, 201 bp, Homo sapiens
attttgctgacttacatggcgttaagtatttgtggttcaatctcccttacttcctactaacacatacctcccactcacaccctaaaaaattcactcagaarcaggcaaatatctcatgatgggaaaagtgattctagcaactcacagcaatcagtcatcagttttgaggggatgtgaactgagaagactgaggataattga

SEQ ID NO: 18825 - DNA, 201 bp, Homo sapiens
ttactcagttatgtaagcacacagggatgctcacaagttgcaactgtgagtttcaaaaaccatcctgagcttgaagataaagaagataaggacctctagarttaagaatgcattcgtggaacaaaatgcaaaaagattttaaaaatactattattttgggtaactttggtctgctcttgttgaaatttttatcatattcaa

SEQ ID NO: 18826 - DNA, 201 bp, Homo sapiens
tgttggaaatggtgcctcaggtgaaacacaaggggtatatagatgcttataaatgctggtgaagggaattccatttctttacattgaagcctgtgttatawtgaaacctgtgtttcaatatgtttttatatttttaacttgaggcctctgagccaatttcattttgataaaactgacctttggtttcatcttcttctaaaa

SEQ ID NO: 18827 - DNA, 201 bp, Homo sapiens
gtgttatattgaaacctgtgtttcaatatgtttttatatttttaacttgaggcctctgagccaatttcattttgataaaactgacctttggtttcatcttyttctaaaagtaaaaagctttgttgattcattttaaatagacaaaagtcagaccaaacttcaaactatttttacacattgaccctttttcatgaaacttgt

SEQ ID NO: 18828 - DNA, 201 bp, Homo sapiens
aatttacatttagtaaagtacacattagtgattgcatgcattataataattagggatctatattctatggaaaaaaggttttattcgatttaaattaagamtagtaagaacatagcctttgtgtaggattccagcttccaccacttattaactataaaaattccagccaattatttaacctctgagattcaggtaacatat

SEQ ID NO: 18829 - DNA, 201 bp, Homo sapiens
gacacacaagttcaaggggacagaagctcagttacaacatggcctgacctgacctttttatgttcaaatcatttccgggtcaggcaagaccaccctggagkcattgcatcctccttctccctgtcacccttgtatcctctcaaaaaaatgtgaccagccttttgtctctttgatgtggctataagtaaaaatgcataaatg

SEQ ID NO: 18830 - DNA, 201 bp, Homo sapiens
ttttttcttgaaaaaagaaaataattaatactcaatcttaaagccagaatcaggatattgttttgtctctagaaaaggcttctggaattataactaatggyataaaaactaagaaataagttcacattaatcctcataattttatctttaattaataaaatagcacattttttagaaaatcacctttttacaaacacctca

SEQ ID NO: 18831 - DNA, 201 bp, Homo sapiens
ttgttttgtctctagaaaaggcttctggaattataactaatggtataaaaactaagaaataagttcacattaatcctcataattttatctttaattaatamaatagcacattttttagaaaatcacctttttacaaacacctcactttctctttgacttcaaaagtgacaattgcagtgaggtaagaaggggactcaccat

SEQ ID NO: 18832 - DNA, 201 bp, Homo sapiens
tccccaaactcatcaggcaggagtccgtgacctgttcctatgatgctgtttaccatttttccccttcaaaatgtgtactcattatttaatctcaacctctrtgtctttgcaaactccggtgagctacagctcctttctgtcctcacagcacattcattcattcattcattcattcactcatagcaattctactttgtgttt

SEQ ID NO: 18833 - DNA, 201 bp, Homo sapiens
agaagatgctaaaattcttgcatatttagcattcaataggtttcctgaagatccttgtattttattgttaatttaaggaaatatgctcattaactctgaayggtgaaaataataattgtttaaaagcagaaaaaaaataatattttccccagtgtctaataagaaataacattatgacaagatataaggcagagagttaaa

SEQ ID NO: 18834 - DNA, 201 bp, Homo sapiens
gggatcctccgcctcagcctccccagtcgctgggatcacaggcatgcatctccatgcccggctaattttttaatttgtagagatgatccttattatgttgyccaggctggtctcaaattcccaagttcaagtgacctcctgtcttggcctcacaaaatgctgggattacaggtgtgagccaccatgcccagccaaaaccag

SEQ ID NO: 18835 - DNA, 201 bp, Homo sapiens
caaaaccagaagtctgggatgctaacacctccatccatgctaggaacttaaggctttatggccagcattctccagtgatggtctatcagactgaaggcccyatcagattcagaacgttggccactgatgtggtcaggtgctttcagtgcactatggcaagatacaaaaccatttgtttcctaactgtgttctactggatta

SEQ ID NO: 18836 - DNA, 201 bp, Homo sapiens
tcctgattttgtcattaaatgtaaatgtactcaatatttgaatataaggcattccagtttccatttaaagacatggagtagaattgcatcttttttttttycccataaaatgcaattacggagaaaagaagagcttctgagtgaattatttgaagtagaaaatcttaatcaacctctttcagggaaaaggagctctacact

SEQ ID NO: 18837 - DNA, 201 bp, Homo sapiens
tattgttcacatacctttatgactgaaagcaacaattatcaaatattttccaatcttctaatgaatctaaaaactgtgtatgaagtggaaataactattgytacacttcctttccttcctattctttaccacggttgctttggattgctcactgttcagcagtgctccacacttcccttggtagtgaacaagcagacagct

SEQ ID NO: 18838 - DNA, 201 bp, Homo sapiens
tgggcaacaggcaaagtttacttttacttgacaaggtgcatctctcataactgcagataatggcaggacatgagaggctcacggactaaagggtctgtccygtctaaaagagctctggggatcatgtggtccaccctctgattcccaaaacatctgaattagcagttcctacaaattacatctctggtaaggggagtttat

SEQ ID NO: 18839 - DNA, 201 bp, Homo sapiens
acattttagggaaaccattaaaagaaaatcagaaaactgctgctgagggggaaaaacagcctcatggaattcatgaaacagtaccacattgtattgcctayaaagggaaaaatcttacatttctgggtgttttctgaaagaatatttgatactttgatgtttgaaaagaagggctaaaaatggaaatgtttataacagggg

SEQ ID NO: 18840 - DNA, 201 bp, Homo sapiens
atataaggcagagagttaaatataatatagtctcagtgtccacagagtttatctagtgggggagatagctgtaaaggagacgggggataaagaagaaaacmagaaagaggaagaagaagaggaaaaaaagaggtgacaaaagaggaaaacgaagagaagaaagaagagaaaaaggaaaacaagaagagatggagcagaata

SEQ ID NO: 18841 - DNA, 201 bp, Homo sapiens
accagggccacatctgcacagcacgaccaaagcacactttgactagaaagtccaagggtagttcaggaagaatcaaatcagaactgcctttagagccccawgctactcactgccttaggagctggtgctgcctctgggcttgggatggccccgcctctctgaccctcccactcccctcactggtcctttcttcctggctcc

SEQ ID NO: 18842 - DNA, 201 bp, Homo sapiens
ttcagcagtgctccacacttcccttggtagtgaacaagcagacagctgaaggagtaaaaattctaggatttttgtttacatcttcattatttccctatgcycaatgcatttcccagctgattttcatgaatgctccctcctctgttcatctcttattccctctcattatccttccgacaggataatgtccttccattgtcc

SEQ ID NO: 18843 - DNA, 201 bp, Homo sapiens; identical to SEQ ID NO: 5153

SEQ ID NO: 18844 - DNA, 201 bp, Homo sapiens; identical to SEQ ID NO: 5153

SEQ ID NO: 18845 - DNA, 201 bp, Homo sapiens
tctcctggacaggccatgctcatccccagattggctctcccagctagagtcccctttcctggctgctgctgtctgtgggaacgtcctccacacccttcccrctttccagtatttaaagcgtgcttcctcttctcatccttcaggtcactgtgccagcccttgagaagggccttccttgtccatcctagctaaaggctctgt

SEQ ID NO: 18846 - DNA, 201 bp, Homo sapiens
ggtttctggagggactttacccatggaccacaagcaatggggataacttcgttggtttttgggtaatcatagtggggtcccaacagtttgtcgaggacccytcacttaattcattggctttatcagattcagtcttggaattggtataccccttcatctcccacacttagttaactcgtctgaataatcaaataattacag

SEQ ID NO: 18847 - DNA, 201 bp, Homo sapiens
tagactcccatcatcagtatataaagtagactattccttagtcccacttaaattttaagtcactaagattaaaaaagaagttaataaagattccagggacrtaaaatcattcaattcaataaactgctctgaatcaaattagtctgaaacactttatccttaaaactgcaaaaacattgtgatactaaatattcaatatta

SEQ ID NO: 18848 - DNA, 201 bp, Homo sapiens; identical to SEQ ID NO: 5155

SEQ ID NO: 18849 - DNA, 201 bp, Homo sapiens
aatcttcagcacaaatcaaaagtaatcaagctggttcaagcttgatcaggatggtttataaatatgtggtacatacaagttgaaatgtaaaaatacaatasagagaatacactgcaagctttaaagtagcctggacagactttacaaaaaggtataggtatagtagtgacattcgtgtgtccaagttttatagaataagat

SEQ ID NO: 18850 - DNA, 201 bp, Homo sapiens
agtttcaagagtggcaaaaaaatgagaccaagtttatatgctctatctgcgctcattcaagggcattgacgggttctagatttgtttcacttaattttatrttttttttttctttcagtcattcattgaacacactaaatgagccccagtggagtcaatattgaaactgcacaataaccgtgtacactttggatctgtcct

SEQ ID NO: 18851 - DNA, 201 bp, Homo sapiens
gacaatacaaatggccagttcattaaaaaggaacctgatgaaagaaatacaaaaacaaatgaaagctgaaatctgtgatctttagaatttcagtaaacaakttcaggaaaaaaaaaccaataaattaaagcactatgacctgaaaaaggactttaaatccctgcatggtatagtaagtcaaaggagaaaaaaaaaagaaac

SEQ ID NO: 18852 - DNA, 201 bp, Homo sapiens
aggcagattgtgtcacagaaggctgcctttaaaattatttagcattacaagttcagggatattagcatacatgcaaactttctctccctaattaagtaaamgtgttcatgaactagaaaacctgctttgggatttttctttcttttcatttctttaagtagttcttaaaagattagttttgcagtaaatttttgagagtta

SEQ ID NO: 18853 - DNA, 201 bp, Homo sapiens
ggagtggggctttgctataaagatacctgagaatgtggaagcaattttggaactcggtaatggacagaggttggaacagtttggagggctcagaagaagayaggaagatgaagaaaagtgtataacttcttaaagattgattaaatgtttgtgaccaaaatgctgacggagatagagacaatgaagtctaggctactgagg

SEQ ID NO: 18854 - DNA, 201 bp, Homo sapiens
catattctcacatgctctatggcataaaaatatcagctgagctgaactaggttgattttagatgacttccagaacacaaaatgaagggctgctgatggcawaccccgaacatatgacatcaacatatagatggcaattatagtctagaaaataacccttcatacttactaggatattaaactgaagaaaatgaggcagatt

SEQ ID NO: 18855 - DNA, 201 bp, Homo sapiens
aagctcaagatgaccttctggatctcacatttgcatcacctaacatttggtgtgtgtgctaagtattttttcatcctttgtaatctcattttgacagaackgaattgtttttgttttttatgtgaaatatctgtaagaacaaaagtgaaaaagctctcattgcattctgcagtatttcaccaatatagaaatctctgcagt

SEQ ID NO: 18856 - DNA, 201 bp, Homo sapiens
gtataaaaaggtattccagttcataggacagcattcttttccatcaactatgtacatataatctctcttttggatcacaacttcggccaggaggttatggsgtatagcgttgccctttaactgcacagttggaaagatgttttttactcagattgagccacctcgtttctgattgcttcatgccaatgccatttgtttcct

SEQ ID NO: 18857 - DNA, 201 bp, Homo sapiens
agaccagcctggccaacgtagtgaaaccctgtctccactaaaaatacaaaaactagccaggtgtagtggcacacgcatataggtattacataattactgtktttgaaagatttagaataatacttggggttttcattattatatttaattattatataataattataagtaatgataataattgggtttgaaagacttcgt

SEQ ID NO: 18858 - DNA, 201 bp, Homo sapiens
gagaccagcctggccaacgtagtgaaaccctgtctccactaaaaatacaaaaactagccaggtgtagtggcacacgcatataggtattacataattactgkttttgaaagatttagaataatacttggggttttcattattatatttaattattatataataattataagtaatgataataattgggtttgaaagacttcg

SEQ ID NO: 18859 - DNA, 201 bp, Homo sapiens
ctttgattaatagtgtgacagccttgtagaataaaactatgattttaaaatctaattttaatcacttaccaaaaacatcacattagggaactttatctggstaagtggacaaagtatggaatgtaggatttctatgaacattgttcattcgtatgttttttttttataaaagcactgctaattatatagaaattgtaataa

SEQ ID NO: 18860 - DNA, 201 bp, Homo sapiens
agaggaagaagaagaggaaaaaaagaggtgacaaaagaggaaaacgaagagaagaaagaagagaaaaaggaaaacaagaagagatggagcagaataaggcrgaaaaaagtaaaaaaagaggaagagaaaagggaaagtaaaaagaaaactaaacttttattgagacttactcttcttgtgtatcaggcattctgagtgttt

SEQ ID NO: 18861 - DNA, 201 bp, Homo sapiens
tgtcattcgttatataaaaaaatgcacatcaatgcagaaatttctactccgttctgttatctgaaaagtcacatgccacctgtttaggaagtatctgattkaaaaaaccaactgtgcatgcttccctagagtcccacataagcccacatgaagagcaactagaaaaagacaaaagcaatggccctttcttggcagcaagtc

SEQ ID NO: 18862 - DNA, 201 bp, Homo sapiens
ccacattttcaaggctcaggagacatcatttatgcattatagagtgtaactctggggcttccattgtatatctgattgagtacctgagaggcactagactmtaaagctatggtgttgcccccattaaagcagactaccagccagtcttataagattatatcatctttgtctttgttgtgcctaaaaacaagagcatattga

SEQ ID NO: 18863 - DNA, 201 bp, Homo sapiens
tatgaaatggttgggtcaggtggccacaaaggtttcatgtaacatcatcaccatacatctcctctctctctctgtctctctctctctctctctctctctcwcacacacacacacacacacacacacacgaccttcattgtaccccagtatactgccttcttaaaatggtacattgaatatacaggcccaaccttctgtggg

SEQ ID NO: 18864 - DNA, 201 bp, Homo sapiens
tgctgattgaaagaagccagtcaaaaaaaaaaaaaaaaaaagctacatcccatttgcttccaattatatgtggacagtaaacattggttgccatgcatcasgaagggaagatggttgaatatagaaagcaaagggggcttttttagggtggtattattccgtatgatactgtaatagtgcatataggaaagtaggcattta

SEQ ID NO: 18865 - DNA, 201 bp, Homo sapiens
tgggtttacttacaaattggataccactattccatggcagatggtggaatggaaccctgatttaaatggatagtggatgtgggtgccaagtttctcactaytgtggtgggttacagcaagagaaggaggctatgcagcaatggactggagttgaagacaatcagtatgaattcatatttagcttaatgtagatacatgttt

SEQ ID NO: 18866 - DNA, 201 bp, Homo sapiens
acaaatctgatggtctcaaaattgctgaggtcatcaaaaacaaggaaagtctgagaaactgcctcaactgagaagagtctactaagacatgaggactaaaygtaatgtggaaaccttggtggaattctggaacagaaaagggatatcagggaaaagctgaggaaatacaaatgaagtatgactttagacagtaagaagcta

SEQ ID NO: 18867 - DNA, 201 bp, Homo sapiens
actttaaaagattatgaaaaatattctaaaaatccataaagaatcctctttcacattgcctcataggagtctttgacttcttgcacccttttaaacacatstaaagggaaaattttcatagacaaagtttcatatctgttgtccgtactacaaagactacaagagctggaaacatggacccaaacagtcagttggtgcctt

SEQ ID NO: 18868 - DNA, 201 bp, Homo sapiens
aacttagaatatttaataaagtttccgagaatgccttacttttctaccaggtattaatatttgactaataaactaagtatagagatggatatttcagaaayataagcattgccacaaaatacatgttagtgtacaatcttgttttttttttaagagaagattctgacagatgatgtattaaggggaagctatgtattatca

SEQ ID NO: 18869 - DNA, 201 bp, Homo sapiens
tgctaaaatatttatggagactgtattttgactaaaggattgcatttacagaatgacttatgtcctagttcctgagatctcagtttacaaagggaaccaawgctagaaccaaatttcacaattgtgtttttcattacgaaaagattttccatgtgtcttccttttaattaattataacagtgatgtatctaggtggtctat

SEQ ID NO: 18870 - DNA, 201 bp, Homo sapiens
tgtttgcacacatggttagtggaatcacagaactgcacataatccaataaagctcacaccaccaaagatatatgtaatcagggatctgaaagaacatcctstaggttatatgcagtctcttttaacttgtacttcacaaaacaaacagtctcttcaggcagaaagaaaatacaagtctgtcatccaaagcaaatatgcagt

SEQ ID NO: 18871 - DNA, 201 bp, Homo sapiens
accacatttcaagaaaacctccttaattcctacttaaggcccaaaagaaatcacctaatttgtgacttggagattgtgaagtaaaaacatatttttagttwtagttattacgtcaaacaaatatacttcattataaatgaaaaaaaatatgccaagagcactgagccatgtaatctagccatctaataaattctttactgt

SEQ ID NO: 18872 - DNA, 201 bp, Homo sapiens
ctcaaaaaaaaaaaaaaaaaagcgttaatagaagtataatatgaataagtctatatttacaaatttgagaagtcaaatgaagtggaacaattccttaaaaktcaacaactactaaaactcatacaaagagaaactgacatcccaaataatcctttacttgctaaataaattgaatcaataattaacaatcttccaaaaaaa

SEQ ID NO: 18873 - DNA, 201 bp, Homo sapiens
taaaccataatatatacaaatttaaaaagctatttaggacattgggggaatctcaggatgaaaagtataatgtgacaaaagaagcttaatgtattgcaaayatatgaaacaacctcattgaaaggagcaggataataagatgctgacttaagtaattttggaaatgagagaagtccataagactaaaggcaaaagaattgt

SEQ ID NO: 18874 - DNA, 201 bp, Homo sapiens
aagagtctactaagacatgaggactaaacgtaatgtggaaaccttggtggaattctggaacagaaaagggatatcagggaaaagctgaggaaatacaaatraagtatgactttagacagtaagaagctaccaatattgattcattaattgtgacacatatatcatactaatgtaagatgttaaaaataggggaatcttagt

SEQ ID NO: 18875 - DNA, 201 bp, Homo sapiens
gactcccacaggggcctcccctgtgtgggaggaggtggggggtgagcgggattgagctataaagattcagaatgtggatccacaaactttaggatttcacygaccacaaagtatttccaaagtaatgaaaatgacaaagatttaccaacttttaacttcgttaaatgaggacactgcaaatctgattactatttcattatc

SEQ ID NO: 18876 - DNA, 201 bp, Homo sapiens
ggctctgtcatgctcatatacatgttctcaccgtcaaactgcgaatgaaataatagtaaacattcagcaatcttgactgcgggtatgtttggtttttattygttttgttttgttttttaaccatcaaactggaaaacagtagccataaaaaatactgcggctgggactatggaaaatctgtcacagcaagcgagccacatc

SEQ ID NO: 18877 - DNA, 201 bp, Homo sapiens
acatagtcctggctcggctctgtcatgctcatatacatgttctcaccgtcaaactgcgaatgaaataatagtaaacattcagcaatcttgactgcgggtakgtttggtttttatttgttttgttttgttttttaaccatcaaactggaaaacagtagccataaaaaatactgcggctgggactatggaaaatctgtcacag

SEQ ID NO: 18878 - DNA, 201 bp, Homo sapiens
cgtatagctttgtttgtaatttacttttttttccaacaaagaagattgtgcagaatcgttaaagtgatcttttatgcctttaagtgactatcaaagtctgygccgagatggccacaatccttcacaatatcacacaactgcacgttaccttggatacaaggctggctctgtatgctgcgagttgcttcaggtactccttct

SEQ ID NO: 18879 - DNA, 201 bp, Homo sapiens
aagccctgggaggccatttcttcagactgcacaatctcagcttatgtagattcccattccactgggaatcccttacctgtttttgctcttctcctaaaccrtcccacattgaagccacaattttagagacttcgccaaaggtagcgtttggattttggcccttgatggcggcctgagtatcacgaaagaataacgcatagg

SEQ ID NO: 18880 - DNA, 201 bp, Homo sapiens
ttgtccttatggtatccctcagcccccaccacaaacaggtaagcagattcttaccacagaaatggaattagaaagcagtgttccatcctggcccagcataytggagactgtgatttcagggaggtccatgttttgtggatgaaatggtagcaggccattatggttcatggggtgacacagagaatggtaaccagactcaac

SEQ ID NO: 18881 - DNA, 201 bp, Homo sapiens
cctggctcggctctgtcatgctcatatacatgttctcaccgtcaaactgcgaatgaaataatagtaaacattcagcaatcttgactgcgggtatgtttggyttttatttgttttgttttgttttttaaccatcaaactggaaaacagtagccataaaaaatactgcggctgggactatggaaaatctgtcacagcaagcga

SEQ ID NO: 18882 - DNA, 201 bp, Homo sapiens
tctttcaacaaatgccaactctggcgttttatcagctctatctcattaactggaaacaaggcttaaatgctttgtttataaattatgattattcctgattrcggcagttactgatagtgctactcatttgcaatgcaactctttgaatttgtttaattacaatttgaaacaaggcagagaagattaattaacccacctggc

SEQ ID NO: 18883 - DNA, 201 bp, Homo sapiens
tttcaacaaatgccaactctggcgttttatcagctctatctcattaactggaaacaaggcttaaatgctttgtttataaattatgattattcctgattgcrgcagttactgatagtgctactcatttgcaatgcaactctttgaatttgtttaattacaatttgaaacaaggcagagaagattaattaacccacctggctg

SEQ ID NO: 18884 - DNA, 201 bp, Homo sapiens; identical to SEQ ID NO: 512

SEQ ID NO: 18885 - DNA, 201 bp, Homo sapiens; identical to SEQ ID NO: 512

SEQ ID NO: 18886 - DNA, 201 bp, Homo sapiens; identical to SEQ ID NO: 513

SEQ ID NO: 18887 - DNA, 201 bp, Homo sapiens; identical to SEQ ID NO: 513

SEQ ID NO: 18888 - DNA, 201 bp, Homo sapiens
aacagtttcagaatgctattatcacaatgccaggccctcgcatgaacttggtccttgtccttatggtatccctcagcccccaccacaaacaggtaagcagrttcttaccacagaaatggaattagaaagcagtgttccatcctggcccagcatattggagactgtgatttcagggaggtccatgttttgtggatgaaatgg

SEQ ID NO: 18889 - DNA, 201 bp, Homo sapiens
tgccccaggagcaccaaatatttgaatgcaaaattttcataagagcatgagacaatttaatacatttatagaattctttaaagagaaagagagagaaaggaaaaaaaaaaaaaaaaccaaaccagtgtccctgtgattagtccagaaggagtgagggaagcaatggagaagggggagtgaagaagaggtggaaggtgactg

SEQ ID NO: 18890 - DNA, 201 bp, Homo sapiens
gccccaggagcaccaaatatttgaatgcaaaattttcataagagcatgagacaatttaatacatttatagaattctttaaagagaaagagagagaaaggaaaaaaaaaaaaaaaaccaaaccagtgtccctgtgattagtccagaaggagtgagggaagcaatggagaagggggagtgaagaagaggtggaaggtgactgc

SEQ ID NO: 18891 - DNA, 201 bp, Homo sapiens
gataccagaggatgcagaatttcagttggggatgatgaaaactttgaggagatgagtggtggtggatggttgcacaacagtgtgaaagtacttaatgccabtgcacctgcacactgaaaaatggtttaaatggtaaatttcatattatgtgaatttttccacaataataaaaaggtcgatgcccagtcgccactattacaa

SEQ ID NO: 18892 - DNA, 201 bp, Homo sapiens
ctattctagagaatgtgttttctggtagcaagaacatgtggggctgctcctgtgacctcagcagatagggcggcctcaacatagacactgacagtaatttyttagctgctcctgccctttcagactgaaagtccttggaatcttcagggaagcacactgaaagaaaatgtacccaaacaaaaatctgcaagtggccaagat

SEQ ID NO: 18893 - DNA, 201 bp, Homo sapiens
ctgggaggcggaggttgcagtgagccgagaccatgccattgcactccagcctgggcaacagagcgagactccatctcaaaaaaaaaaaaaaaaaaaaattkgtactttttcttcttcagctattatccaaacaagccacccttcctttcttaagatcctgaaaaaacatcaaatgtgtgtgttcatctattttgtgttaat

SEQ ID NO: 18894 - DNA, 201 bp, Homo sapiens
ctcagcctcccaagtagctgggactacaggcgcccgccaccacgcccagctaattttttttttatttttttattttttagtagagacggggtttcaccttsttagccaggatggtctcgatctcctgacctcgtgatccgcccgcctcggcctcccaaagtgctgggacaggcgtgagccaccgcgcccggctgaattgtt

SEQ ID NO: 18895 - DNA, 201 bp, Homo sapiens
ttaaaattagtcatgagctcttttcagctagtttgcaatctattccactgactcattttcaatgacagtataagcaaatcattttatctatccattattatttggcccggtaatgaaaatgaaaaaaacaaacagctggtgatataagaaaacatgcacgcttaaaacatctgaactatatttaaatccataatataagtc

SEQ ID NO: 18896 - DNA, 201 bp, Homo sapiens
taaaattagtcatgagctcttttcagctagtttgcaatctattccactgactcattttcaatgacagtataagcaaatcattttatctatccattattatttggcccggtaatgaaaatgaaaaaaacaaacagctggtgatataagaaaacatgcacgcttaaaacatctgaactatatttaaatccataatataagtca

SEQ ID NO: 18897 - DNA, 201 bp, Homo sapiens
aaattagtcatgagctcttttcagctagtttgcaatctattccactgactcattttcaatgacagtataagcaaatcattttatctatccattattatttggcccggtaatgaaaatgaaaaaaacaaacagctggtgatataagaaaacatgcacgcttaaaacatctgaactatatttaaatccataatataagtcagt

SEQ ID NO: 18898 - DNA, 201 bp, Homo sapiens
aattagtcatgagctcttttcagctagtttgcaatctattccactgactcattttcaatgacagtataagcaaatcattttatctatccattattatttggcccggtaatgaaaatgaaaaaaacaaacagctggtgatataagaaaacatgcacgcttaaaacatctgaactatatttaaatccataatataagtcagtt

SEQ ID NO: 18899 - DNA, 201 bp, Homo sapiens
attagtcatgagctcttttcagctagtttgcaatctattccactgactcattttcaatgacagtataagcaaatcattttatctatccattattatttggcccggtaatgaaaatgaaaaaaacaaacagctggtgatataagaaaacatgcacgcttaaaacatctgaactatatttaaatccataatataagtcagttt

SEQ ID NO: 18900 - DNA, 201 bp, Homo sapiens
ttagtcatgagctcttttcagctagtttgcaatctattccactgactcattttcaatgacagtataagcaaatcattttatctatccattattatttggcccggtaatgaaaatgaaaaaaacaaacagctggtgatataagaaaacatgcacgcttaaaacatctgaactatatttaaatccataatataagtcagtttg

SEQ ID NO: 18901 - DNA, 201 bp, Homo sapiens
tagtcatgagctcttttcagctagtttgcaatctattccactgactcattttcaatgacagtataagcaaatcattttatctatccattattatttggcccggtaatgaaaatgaaaaaaacaaacagctggtgatataagaaaacatgcacgcttaaaacatctgaactatatttaaatccataatataagtcagtttgc

SEQ ID NO: 18902 - DNA, 201 bp, Homo sapiens
tcatgagctcttttcagctagtttgcaatctattccactgactcattttcaatgacagtataagcaaatcattttatctatccattattatttggcccggtaatgaaaatgaaaaaaacaaacagctggtgatataagaaaacatgcacgcttaaaacatctgaactatatttaaatccataatataagtcagtttgctct

SEQ ID NO: 18903 - DNA, 201 bp, Homo sapiens
catgagctcttttcagctagtttgcaatctattccactgactcattttcaatgacagtataagcaaatcattttatctatccattattatttggcccggtaatgaaaatgaaaaaaacaaacagctggtgatataagaaaacatgcacgcttaaaacatctgaactatatttaaatccataatataagtcagtttgctctt

SEQ ID NO: 18904 - DNA, 201 bp, Homo sapiens
gagctcttttcagctagtttgcaatctattccactgactcattttcaatgacagtataagcaaatcattttatctatccattattatttggcccggtaatgaaaatgaaaaaaacaaacagctggtgatataagaaaacatgcacgcttaaaacatctgaactatatttaaatccataatataagtcagtttgctctttca

SEQ ID NO: 18905 - DNA, 201 bp, Homo sapiens
agctcttttcagctagtttgcaatctattccactgactcattttcaatgacagtataagcaaatcattttatctatccattattatttggcccggtaatgaaaatgaaaaaaacaaacagctggtgatataagaaaacatgcacgcttaaaacatctgaactatatttaaatccataatataagtcagtttgctctttcaa

SEQ ID NO: 18906 - DNA, 201 bp, Homo sapiens
gctcttttcagctagtttgcaatctattccactgactcattttcaatgacagtataagcaaatcattttatctatccattattatttggcccggtaatgaaaatgaaaaaaacaaacagctggtgatataagaaaacatgcacgcttaaaacatctgaactatatttaaatccataatataagtcagtttgctctttcaac

SEQ ID NO: 18907 - DNA, 201 bp, Homo sapiens
ctcttttcagctagtttgcaatctattccactgactcattttcaatgacagtataagcaaatcattttatctatccattattatttggcccggtaatgaaaatgaaaaaaacaaacagctggtgatataagaaaacatgcacgcttaaaacatctgaactatatttaaatccataatataagtcagtttgctctttcaact

SEQ ID NO: 18908 - DNA, 201 bp, Homo sapiens
cagctagtttgcaatctattccactgactcattttcaatgacagtataagcaaatcattttatctatccattattatttggcccggtaatgaaaatgaaawaaacaaacagctggtgatataagaaaacatgcacgcttaaaacatctgaactatatttaaatccataatataagtcagtttgctctttcaacttagggac

SEQ ID NO: 18909 - DNA, 201 bp, Homo sapiens
gaagaaaataatttaattggaaggtaaaaagaagaaatattttactctttaaatttttttttaactgagaaatatcaccaagttactaaagatacagaatggaaaaggaagaataaagagtcattaataaatatatctcctctgaacaacatcaacactcattttgtttcttaaatgtccatacagtggtctactgtcaaa

SEQ ID NO: 18910 - DNA, 201 bp, Homo sapiens
aaatcaccactgtaaatcacatgaaccaaaacgtctatagacatatctaagtaaagaaaagcatttctaattctttttgctgtgatatataaatcatgtatgtgtgtgtgtgtgttcgtgtgtgtgtgtgttcgtgtgtgtatatgtacacgaactatgctataccttcctcgaggaccaatgttgtgctaaatgtactaa

SEQ ID NO: 18911 - DNA, 201 bp, Homo sapiens
aatcaccactgtaaatcacatgaaccaaaacgtctatagacatatctaagtaaagaaaagcatttctaattctttttgctgtgatatataaatcatgtatgtgtgtgtgtgtgttcgtgtgtgtgtgtgttcgtgtgtgtatatgtacacgaactatgctataccttcctcgaggaccaatgttgtgctaaatgtactaaa

SEQ ID NO: 18912 - DNA, 201 bp, Homo sapiens
aaaagtaaaaaaagaggaagagaaaagggaaagtaaaaagaaaactaaacttttattgagacttactcttcttgtgtatcaggcattctgagtgttttacmggttttgttaatttaatctttacaacaaccttgtatgcttggtaatattatacccattttaatgattaggaaactgaggcacaggcaaatgaggtaactt

SEQ ID NO: 18913 - DNA, 201 bp, Homo sapiens
agatggaagagacatgcaacaattgttgttgaattcaaatacttgtatttttaatatgggctaaaagtaataaagctaatttataacaaatatgtgacagygcagctacttcaaaataaacttacaagtgaataattctctcacatttttgctctcttctgaataattaaaaagtttaagtttaaatggaaaggtaaagcc

SEQ ID NO: 18914 - DNA, 201 bp, Homo sapiens
gcttgaacccgggaggcggaggttgcggtgagcccagatcgcgccattgcactccagcctgggcaacaagagtgaaactccatctcaaaaaaaaaaaaaarggggtcaggaagggcctacatgagggagggaagggagagctcaggaagtcagagagaagaaggcgctgtaaaccaggttagaagaatctttcaaggggag

SEQ ID NO: 18915 - DNA, 201 bp, Homo sapiens
aacagggtttctccatgttggccagggtggtctcaaactcctgacctcaagtgatctgcctgcctcagcctcccaaagtgctgggattacaggagtcagcygctgtgccgggccagggaaggtgttaaaatgagaggaatttgattctgtgtataaagggagttttcaagttaattcgggattgcagcataaatgagttga

SEQ ID NO: 18916 - DNA, 201 bp, Homo sapiens
aaaccatttgtttcctaactgtgttctactggattacacaaagttaaagaagtgacaatattgaagggcttctcagagccttttataagctaatatgtaaygagtttctaagaggagagtagtgaatgcagtgatgttttatttgacctaggaaaacttttctcaaggaacacctatcaaaaatttcacaagacatacata

SEQ ID NO: 18917 - DNA, 201 bp, Homo sapiens
tctaagaggagagtagtgaatgcagtgatgttttatttgacctaggaaaacttttctcaaggaacacctatcaaaaatttcacaagacatacatatttttrgcacacagtgtggaaaatgctgctgtaggtaactgaattaaattatctgcatactagttgccctgtgactctttaaattttgcttaaatctaagagccct

SEQ ID NO: 18918 - DNA, 201 bp, Homo sapiens
ctcattcgccttttgcatttctcttgatgatggaaacatagttgagtttcatttttttctcttctcttaaaacactgaagattcctaaatcataaaggaaacacacacacacacacacacacacacacacatacacacacaaggttatcaaaagagtaacagaaaatagaaggcaataatacaagatgagaaaatgagatc

SEQ ID NO: 18919 - DNA, 201 bp, Homo sapiens
tcattcgccttttgcatttctcttgatgatggaaacatagttgagtttcatttttttctcttctcttaaaacactgaagattcctaaatcataaaggaaacacacacacacacacacacacacacacacatacacacacaaggttatcaaaagagtaacagaaaatagaaggcaataatacaagatgagaaaatgagatct

SEQ ID NO: 18920 - DNA, 201 bp, Homo sapiens
cattcgccttttgcatttctcttgatgatggaaacatagttgagtttcatttttttctcttctcttaaaacactgaagattcctaaatcataaaggaaacacacacacacacacacacacacacacacatacacacacaaggttatcaaaagagtaacagaaaatagaaggcaataatacaagatgagaaaatgagatctt

SEQ ID NO: 18921 - DNA, 201 bp, Homo sapiens
attcgccttttgcatttctcttgatgatggaaacatagttgagtttcatttttttctcttctcttaaaacactgaagattcctaaatcataaaggaaacacacacacacacacacacacacacacacatacacacacaaggttatcaaaagagtaacagaaaatagaaggcaataatacaagatgagaaaatgagatcttg

SEQ ID NO: 18922 - DNA, 201 bp, Homo sapiens
aagtcttcactttccaggcttggaccagggtaggactgtgaaaagacaaaagtgacattgttgcaaattatcatcttcttgctcttcatcatcatatcaaacacacttgaccctttagatattattacaagcagcatatggatttggcaaagacatttcaaaccttcagattatcctgctgccatttcatcattatgcatg

SEQ ID NO: 18923 - DNA, 201 bp, Homo sapiens
gctacatctttctctgatgagaaggagacagatgttggactaggcgagaatacgcatgacttcttcagtgactgttaagaatggccactgtgcatgttgcyaagaattgaggctttgaagcccaatggacaaggtctgcttccaagtcctttaaaccacatattaatttgggttctgcagcaagcttaaaaaccacggggt

SEQ ID NO: 18924 - DNA, 201 bp, Homo sapiens
gttgccaagaattgaggctttgaagcccaatggacaaggtctgcttccaagtcctttaaaccacatattaatttgggttctgcagcaagcttaaaaaccayggggttcttataagcattaaaaacaaaaacatatgtaaaaagcctaataatatgtgtttgccagatacaaagttctggataaacaatggctttatatagc

SEQ ID NO: 18925 - DNA, 201 bp, Homo sapiens
gcagggtagccctaatactatctgcctctctctccacatacttccaggaaagtccttagtgtttacatgcagggctttctcccgccataattcattaatgrtaccagaatggggaagggatttgtctcctctcagtattgcttgggggtctacataagtctccaagcagtatttttagggggaattttcataccaggcatt

SEQ ID NO: 18926 - DNA, 201 bp, Homo sapiens
ctccagagtatgtattatcttacactagtctaaattttaaaacagcacattctaaaaacattttcatatatgctacactatttttttaagtgtttatttctggatcacaagcctgccctatctttataaagcacaaaagtatttggggctcttctttacaaattatcactggtatccaaaacattcttagtaactcctgac

SEQ ID NO: 18927 - DNA, 201 bp, Homo sapiens
agcttgctaactgcaggtcttgggacatctcagtatccataatcatgtcagccaattccttatactgaatctcttttgatagatagaagatagatagatakatatatatatagatagatagatagatagatagataggtagatagatagacagacagatacatagatcatctatccatccatccagttggttttgtttctc

SEQ ID NO: 18928 - DNA, 201 bp, Homo sapiens
gctaactgcaggtcttgggacatctcagtatccataatcatgtcagccaattccttatactgaatctcttttgatagatagaagatagatagatagatatrtatatagatagatagatagatagatagataggtagatagatagacagacagatacatagatcatctatccatccatccagttggttttgtttctctggag

SEQ ID NO: 18929 - DNA, 201 bp, Homo sapiens
taactgcaggtcttgggacatctcagtatccataatcatgtcagccaattccttatactgaatctcttttgatagatagaagatagatagatagatatatrtatagatagatagatagatagatagataggtagatagatagacagacagatacatagatcatctatccatccatccagttggttttgtttctctggagca

SEQ ID NO: 18930 - DNA, 201 bp, Homo sapiens
ttactccaacactcataaaaaatgaggaatcagactctgactacagctttatacttcatctccataagaagtgggaatagactcaatggctatttgtagckggtgtgtgtgtgtgtgtgtgtgtgtgtgcaccctacagacctgaaggcacagcattcacattaccacattctaatgaccccacttcactctacctggatt

SEQ ID NO: 18931 - DNA, 201 bp, Homo sapiens
cagctgacactgttcccatgtagcctccagaggcaccacttccattgccaccacagctacaaaccaaggtgtccccaagcacagcagcaatttatatagakaagctttgcacctggctggagctgaggaggttttgggtaacatactctgagagtgcagggaaatttcctattgtcccatggaaggactggctcatgatgt

SEQ ID NO: 18932 - DNA, 201 bp, Homo sapiens
tctccatttcacatatgaggcggcagctaaagtaccctgtgcctgcttctgcacctaggacgagcccatctttctaatcactgcatggtaattggaacaayggacaccatgatgttagatttgggattctctgccctcagacacatctgatttcaatattctttccattataccaataaaaaatacccctggtttttaaac

SEQ ID NO: 18933 - DNA, 201 bp, Homo sapiens
atattattatatatacttacagagaaatgtatatgtatatatgtgtgtgtatatagataataagtgtgtatatgtatgtatatgtgtgtgatatatatatacacacacacacacacacccccacacagagagagagagagagaggggagattgacactactttagagcaatataaagtcatcgtttcaatttttctaacaa

SEQ ID NO: 18934 - DNA, 201 bp, Homo sapiens
tattattatatatacttacagagaaatgtatatgtatatatgtgtgtgtatatagataataagtgtgtatatgtatgtatatgtgtgtgatatatatatacacacacacacacacacccccacacagagagagagagagagaggggagattgacactactttagagcaatataaagtcatcgtttcaatttttctaacaaa

SEQ ID NO: 18935 - DNA, 201 bp, Homo sapiens
agtttctcagtccacatacaagttatgtttacactatactacagtctattaagtgtgcgatagaattatgtctaaaaatgtgcataccttaattaaaacayattttattgctaagaaatgctaataatcacctgagccttcagcaagtcataatctttttgctggtggagggtcttgccttactgttgatgactgctgact

SEQ ID NO: 18936 - DNA, 201 bp, Homo sapiens
aggccggagaatggcgtgaacccgggaggcggagcttgcagggagccaagaccgcgccactgcactccagcctgggcgacagagcaagactccgtctcaaaaaaaaaaaaaaaaaaaaaaaattgactaaaaaaatcccagaaaataaggatgtggagaaattggaaccctgtgcattattggtgggcatgtaagatggtg

SEQ ID NO: 18937 - DNA, 201 bp, Homo sapiens
gcataatgagaatgactagaacacacacgtatttccattaaggaaaaaaaatcagtaaggtcatatatccctatttagtttatagctttcaaaatgccaagtgtgtgtgtgtgtgtgtgtgtgtgtgtgcgcgcgcgcatgtgtgtgtattttttttttttaaagaaaggactaaatctctttagacctgtcggaaactcc

SEQ ID NO: 18938 - DNA, 201 bp, Homo sapiens
cataatgagaatgactagaacacacacgtatttccattaaggaaaaaaaatcagtaaggtcatatatccctatttagtttatagctttcaaaatgccaagtgtgtgtgtgtgtgtgtgtgtgtgtgtgcgcgcgcgcatgtgtgtgtattttttttttttaaagaaaggactaaatctctttagacctgtcggaaactcca

SEQ ID NO: 18939 - DNA, 201 bp, Homo sapiens
cacacgtatttccattaaggaaaaaaaatcagtaaggtcatatatccctatttagtttatagctttcaaaatgccaagtgtgtgtgtgtgtgtgtgtgtgygtgtgcgcgcgcgcatgtgtgtgtattttttttttttaaagaaaggactaaatctctttagacctgtcggaaactccaagtccatgaggtagaaagttct

SEQ ID NO: 18940 - DNA, 201 bp, Homo sapiens
cacgtatttccattaaggaaaaaaaatcagtaaggtcatatatccctatttagtttatagctttcaaaatgccaagtgtgtgtgtgtgtgtgtgtgtgtgygtgcgcgcgcgcatgtgtgtgtattttttttttttaaagaaaggactaaatctctttagacctgtcggaaactccaagtccatgaggtagaaagttctac

SEQ ID NO: 18941 - DNA, 201 bp, Homo sapiens
cgtatttccattaaggaaaaaaaatcagtaaggtcatatatccctatttagtttatagctttcaaaatgccaagtgtgtgtgtgtgtgtgtgtgtgtgtgygcgcgcgcgcatgtgtgtgtattttttttttttaaagaaaggactaaatctctttagacctgtcggaaactccaagtccatgaggtagaaagttctactg

SEQ ID NO: 18942 - DNA, 201 bp, Homo sapiens
tttccattaaggaaaaaaaatcagtaaggtcatatatccctatttagtttatagctttcaaaatgccaagtgtgtgtgtgtgtgtgtgtgtgtgtgtgcgygcgcgcatgtgtgtgtattttttttttttaaagaaaggactaaatctctttagacctgtcggaaactccaagtccatgaggtagaaagttctactgtcca

SEQ ID NO: 18943 - DNA, 201 bp, Homo sapiens
aatgccatcagtaggtttctgcgggtgactccaacactccccggacaagttaagaagtgttccatatttgagaatttgatctttcctggtctcatactttygtcaagtttaatatatgtaacccaagtgaatgatcagttcctgggttctatcattcactatacataccacctgcagatctgaggcatcatgaagtcaccc

SEQ ID NO: 18944 - DNA, 201 bp, Homo sapiens
ggtgcccgccaccatgcctggctaattttttgtatttttagtagagacgggttttcaccatgttagccaggatggtctcgatctcctgacctcgtgatccrcccgcctcggcctggaaactgcttttttaacccattaataattacataaatgctcagacttgcatatcagatgtaatatttttctcatgttaatgtcaga

SEQ ID NO: 18945 - DNA, 201 bp, Homo sapiens
ccagactccatctcaaaagtatatatatatatatatatatatatatatatatatatatatgtaataaatttatatataataaatttatatgtaataaatttatatataataaatttatatgtaataaatttatatgtaataaatttatataataatatattttatatatataataaatttatatatgtatggtaagatttg

SEQ ID NO: 18946 - DNA, 201 bp, Homo sapiens
cagactccatctcaaaagtatatatatatatatatatatatatatatatatatatatatgtaataaatttatatataataaatttatatgtaataaatttatatataataaatttatatgtaataaatttatatgtaataaatttatataataatatattttatatatataataaatttatatatgtatggtaagatttgg

SEQ ID NO: 18947 - DNA, 201 bp, Homo sapiens
ctccatctcaaaagtatatatatatatatatatatatatatatatatatatatatgtaataaatttatatataataaatttatatgtaataaatttatatrtaataaatttatatgtaataaatttatatgtaataaatttatataataatatattttatatatataataaatttatatatgtatggtaagatttggaaaa

SEQ ID NO: 18948 - DNA, 201 bp, Homo sapiens
aagtatatatatatatatatatatatatatatatatatatatatgtaataaatttatatataataaatttatatgtaataaatttatatataataaatttatatgtaataaatttatatgtaataaatttatataataatatattttatatatataataaatttatatatgtatggtaagatttggaaaatgttttcttaa

SEQ ID NO: 18949 - DNA, 201 bp, Homo sapiens
agtatatatatatatatatatatatatatatatatatatatatgtaataaatttatatataataaatttatatgtaataaatttatatataataaatttatatgtaataaatttatatgtaataaatttatataataatatattttatatatataataaatttatatatgtatggtaagatttggaaaatgttttcttaat

SEQ ID NO: 18950 - DNA, 201 bp, Homo sapiens
tatatatatatatgtaataaatttatatataataaatttatatgtaataaatttatatataataaatttatatgtaataaatttatatgtaataaatttawataataatatattttatatatataataaatttatatatgtatggtaagatttggaaaatgttttcttaatcaggagcagcctagaaggtatatctggtcc

SEQ ID NO: 18951 - DNA, 201 bp, Homo sapiens
atatatatatatgtaataaatttatatataataaatttatatgtaataaatttatatataataaatttatatgtaataaatttatatgtaataaatttatrtaataatatattttatatatataataaatttatatatgtatggtaagatttggaaaatgttttcttaatcaggagcagcctagaaggtatatctggtcca

SEQ ID NO: 18952 - DNA, 201 bp, Homo sapiens
tatatatatatgtaataaatttatatataataaatttatatgtaataaatttatatataataaatttatatgtaataaatttatatgtaataaatttatakaataatatattttatatatataataaatttatatatgtatggtaagatttggaaaatgttttcttaatcaggagcagcctagaaggtatatctggtccac

SEQ ID NO: 18953 - DNA, 201 bp, Homo sapiens
cgtgaacccgggaggcggagcttgcagtgagcgagatcgcgccactgcactccagcctgggcaacacagcaagactccgtctcaaaacaacaacaacaacaaaaaaaaaacaaacaaaaaaaatcaggcatataaaatgaacaacattgtaaaagaccttctaaccatttagcatgtatatgtcactaggtaaaaaatagt

SEQ ID NO: 18954 - DNA, 201 bp, Homo sapiens
agcttgcagtgagcgagatcgcgccactgcactccagcctgggcaacacagcaagactccgtctcaaaacaacaacaacaacaaaaaaaaaacaaacaaamaaaatcaggcatataaaatgaacaacattgtaaaagaccttctaaccatttagcatgtatatgtcactaggtaaaaaatagttataatgatttttcttat

SEQ ID NO: 18955 - DNA, 201 bp, Homo sapiens
catatatacatacagatgcaagtagcatacttttattctatgtgaaaaatagttacgtgatcatagcctattttccttttcctgttaacttttcaagcacwatatatatatatatacacacacatcacaatagaaaaaatacttcaaaatgctaataattttgtctcttgatagccttaataatacagcgtttttagcaat

SEQ ID NO: 18956 - DNA, 201 bp, Homo sapiens
acctgatcctggcctattcccagagatctattagcgatgggattttaacgagtgacataaggaagagggcgctacagtttttatggaagttcaggattcaygaggattgtggaaaagtacaacacaagactttttttcaacagtgaaagacggggggaaaaggaatgaataaaatgttcggattttcggatgttaaatgat

SEQ ID NO: 18957 - DNA, 201 bp, Homo sapiens
tgtgtgattacatttttatttcatttttgcaaataatgctagcatgtaaatatattcagaaatttattttatgtaatttaaacttgaaaatatcattttcttttttttttttgagacagactctcgctctgtcgcccaggctagagtgcagtggcacgatctcggctcactgcaagctctgcctcccgggttcacgccatt

SEQ ID NO: 18958 - DNA, 201 bp, Homo sapiens
cccgggttcacgccattctcctgcctcagcctcccaagtagctgggactacaggtgcccgccaccaagcctggctaattttttgtatttttagtagagacrgggtttcaccgtgttagccaggatggtcttcatctcctgaccttgtgatccacctgcctcggcctcccaaagtgctgggattacaggagtgagccactgc

SEQ ID NO: 18959 - DNA, 201 bp, Homo sapiens
gtaagaatcacatttatataccaataattgtatatgtggatatatataatatatgtaatatatataatatatgtaatatataatatatgtaatatatgtaatatatatataatatatgtaatatgtatataatatatgtaatatatatataaatacctgaattttacaagtatgctcaccatttcatataataattttcat

SEQ ID NO: 18960 - DNA, 201 bp, Homo sapiens
taagaatcacatttatataccaataattgtatatgtggatatatataatatatgtaatatatataatatatgtaatatataatatatgtaatatatgtaatatatatataatatatgtaatatgtatataatatatgtaatatatatataaatacctgaattttacaagtatgctcaccatttcatataataattttcatt

SEQ ID NO: 18961 - DNA, 201 bp, Homo sapiens
tgagtgtacagagaacgttttggtggtgtgtttcctgttcttaaagaaaactcttgcaacacagagctccatatggcaggcctgtgctttcctaggacagmactccttcaggctggcaatcttgaaaaggacgtagggaaatacgtagagatttcagattctagaagacagctttgacttacagaaaagagagaatggagg

SEQ ID NO: 18962 - DNA, 201 bp, Homo sapiens
taggccacttgtaatgtggctagtacaactgagcaattgaatttctaaatttaattttaattggttaaatttaaatggaagcagtcacacatgactagaartcactggattagacagcacagtattttgtactggacactgctctagagtacatacagtatttgtaaagttaccagggtgctaagactggagagttaaatt

SEQ ID NO: 18963 - DNA, 201 bp, Homo sapiens
gttaagagtgcaatagacagaagacaaaccccatgccttaccaaaagcaagatgtgtaatgggagtggtcctgttaaatcaagacgtaaaagattagactrtcagtgcaagggtgaagtaacattcccttgtatgtgacctcccagaacatgcaagaatggctgctctggaaccttgttacaaatgcagagtggaacaaaa

SEQ ID NO: 18964 - DNA, 201 bp, Homo sapiens
ctgctctggaaccttgttacaaatgcagagtggaacaaaatctcttgtgttcattcacaaacaaaagccagcatttgcaagatttgtagcctgaacatacwctatgtgggtggtctgaaaaattcaggccaagtgtggttcttgattctaatggttcaaaatatgtggcagaaacaaatataaatcatccccagagaaatc

SEQ ID NO: 18965 - DNA, 201 bp, Homo sapiens
ctttaaaatttatttctttaacatgtatgtaccttctagataataatctccttgattagttcatgactaatgcatttttcaatccctcttgagatatcttttagttaaatggtattccaaatattcaaaaaatatttgctgtgtcagtgtgtaactaaggaaatgaattcatcagtataaactgactttaactagtctgat

SEQ ID NO: 18966 - DNA, 201 bp, Homo sapiens
tttaaaatttatttctttaacatgtatgtaccttctagataataatctccttgattagttcatgactaatgcatttttcaatccctcttgagatatcttttagttaaatggtattccaaatattcaaaaaatatttgctgtgtcagtgtgtaactaaggaaatgaattcatcagtataaactgactttaactagtctgatg

SEQ ID NO: 18967 - DNA, 201 bp, Homo sapiens
ttaaaatttatttctttaacatgtatgtaccttctagataataatctccttgattagttcatgactaatgcatttttcaatccctcttgagatatcttttagttaaatggtattccaaatattcaaaaaatatttgctgtgtcagtgtgtaactaaggaaatgaattcatcagtataaactgactttaactagtctgatga

SEQ ID NO: 18968 - DNA, 201 bp, Homo sapiens
taaaatttatttctttaacatgtatgtaccttctagataataatctccttgattagttcatgactaatgcatttttcaatccctcttgagatatcttttagttaaatggtattccaaatattcaaaaaatatttgctgtgtcagtgtgtaactaaggaaatgaattcatcagtataaactgactttaactagtctgatgat

SEQ ID NO: 18969 - DNA, 201 bp, Homo sapiens
aaataaaaaccctgtgctcatctcaggttattatttttaaaaaatgagtaagattttggtgtaactggaatggtgaaaaaaaaatccttggaataacattagtcatgttagtgatgaaatagtgttaaaatcacatacttgaatggcaccagaacgatggagggcctgcctttcagtgtttaaaactctgtgtgcttcaca

SEQ ID NO: 18970 - DNA, 201 bp, Homo sapiens
aataaaaaccctgtgctcatctcaggttattatttttaaaaaatgagtaagattttggtgtaactggaatggtgaaaaaaaaatccttggaataacattagtcatgttagtgatgaaatagtgttaaaatcacatacttgaatggcaccagaacgatggagggcctgcctttcagtgtttaaaactctgtgtgcttcacaa

SEQ ID NO: 18971 - DNA, 201 bp, Homo sapiens
ataaaaaccctgtgctcatctcaggttattatttttaaaaaatgagtaagattttggtgtaactggaatggtgaaaaaaaaatccttggaataacattagtcatgttagtgatgaaatagtgttaaaatcacatacttgaatggcaccagaacgatggagggcctgcctttcagtgtttaaaactctgtgtgcttcacaat

SEQ ID NO: 18972 - DNA, 201 bp, Homo sapiens
taaaaaccctgtgctcatctcaggttattatttttaaaaaatgagtaagattttggtgtaactggaatggtgaaaaaaaaatccttggaataacattagtcatgttagtgatgaaatagtgttaaaatcacatacttgaatggcaccagaacgatggagggcctgcctttcagtgtttaaaactctgtgtgcttcacaatc

SEQ ID NO: 18973 - DNA, 201 bp, Homo sapiens
aaaaccctgtgctcatctcaggttattatttttaaaaaatgagtaagattttggtgtaactggaatggtgaaaaaaaaatccttggaataacattagtcatgttagtgatgaaatagtgttaaaatcacatacttgaatggcaccagaacgatggagggcctgcctttcagtgtttaaaactctgtgtgcttcacaatcct

SEQ ID NO: 18974 - DNA, 201 bp, Homo sapiens
ttcttaaccaatgcccccaggcaatcttaacttaggtaaattttttcaatatgatgcccagcctcctgaaaaaaatgttaattggcagaatggccatttakaatagaattataatcttactaactgcacatttataaattgatatttgcaactctgttgtcccctaatttcctggtgatagaagaattcaaatactgatgt

SEQ ID NO: 18975 - DNA, 201 bp, Homo sapiens
ctaaggcaagggaatcacttgaacccgggaggcagaggttgcagtgagctgagattgcaccactgcactccagtctggcaacagagcgagactgcgtctcaaaaaaaaaaaaaaaaaagcgttaatagaagtataatatgaataagtctatatttacaaatttgagaagtcaaatgaagtggaacaattccttaaaattca

SEQ ID NO: 18976 - DNA, 201 bp, Homo sapiens
tttttatccctgatgtttatcccatcttgactcacaattcttttcccttttttataggagggtggaaagaggcaatgactcaaagttaggtggtatttggaaaaaaaaaaaaagagagagaatctaaaaactcctttgctctccctagtttcaaaccaacatcaaaagaacagggagtaggacagatggccaactccaagc

SEQ ID NO: 18977 - DNA, 201 bp, Homo sapiens
ttttatccctgatgtttatcccatcttgactcacaattcttttcccttttttataggagggtggaaagaggcaatgactcaaagttaggtggtatttggaaaaaaaaaaaaagagagagaatctaaaaactcctttgctctccctagtttcaaaccaacatcaaaagaacagggagtaggacagatggccaactccaagca

SEQ ID NO: 18978 - DNA, 201 bp, Homo sapiens
tgaggtaggaaaatcgcttgaacccgggaggcagaggttgcagtgagccgagatcatgccactgcactccagcctaggcgacaaagcaagacttcatctcaaaaaaaaaaaaaacaaaaaaactcaacaacaacaacaaaaattgtgtttgaataagggcaacagaaggaaaatgcataaaatctcatttccattaagacc

SEQ ID NO: 18979 - DNA, 201 bp, Homo sapiens
tataatggatactcttaagttttccaagtacacaataaaatcatctgtaagtaaggacagctttactttgttttcttcccaaccacaatttaccttttatrtttacttttattttatgttttatattttattttatgtttatttttattttattttattggctagtactttcaatgtgttaaaggtagttgttataggggc

SEQ ID NO: 18980 - DNA, 201 bp, Homo sapiens
caacacattttctaatattgagctactgttgcatgtttggaataaatctttcttattcaggatggattcttctaatttttgttttttcatattttatttargtttttgtgttggtatttattagtgagcctgttctttagttttatttttgtgtgtaattcctgtcaatttttagtatcaatattatactcacttcataca

SEQ ID NO: 18981 - DNA, 201 bp, Homo sapiens
aaatgcatatacattttttatccagaagttccactgctgcacttacactcatataagatatttatacagggctcttcattgcagcattgtttacaatagcaaaaaaaaaaaaaaacaaacaaaaaaccctgaaaacaaaatacccttaaacaggatactagttaattgaattatgaagaatacacacaatggaacactagg

SEQ ID NO: 18982 - DNA, 201 bp, Homo sapiens
ttttatccagaagttccactgctgcacttacactcatataagatatttatacagggctcttcattgcagcattgtttacaatagcaaaaaaaaaaaaaaamaaacaaaaaaccctgaaaacaaaatacccttaaacaggatactagttaattgaattatgaagaatacacacaatggaacactaggcaatgattaaaaaaa

SEQ ID NO: 18983 - DNA, 201 bp, Homo sapiens
tgggggtgaaaatgggaagctggaaggtaagaatgggatactttgcagttttgaacaatgtgaatgttttactaactcaaataattaaatttagaaaaaarcagaaattttaaaatgacatttatactataaaatatatctgtcagtaatagatggacctcccgtaagtgtcttcaaataagattttacttcctaggaggg

SEQ ID NO: 18984 - DNA, 201 bp, Homo sapiens
tattttgctccaattgccatttaactcagcaatctgtaactgctttgtgtctacagtaattttgtaaagttataattttgcatgggaatcatgatttgccrttcaaattgctccagattacatccataatctcccccccacaaaacacagacaaacatactcctgtaattctggggaaaaatggagttctcaacaacttta

SEQ ID NO: 18985 - DNA, 201 bp, Homo sapiens
tctgtaactgctttgtgtctacagtaattttgtaaagttataattttgcatgggaatcatgatttgccgttcaaattgctccagattacatccataatctcccccccacaaaacacagacaaacatactcctgtaattctggggaaaaatggagttctcaacaactttattcatatcttcaggtggcaagaagataatatt

SEQ ID NO: 18986 - DNA, 201 bp, Homo sapiens
gaatattcatgaggctatagtcattccaagactaaaatgttagattctgccactttttcatagatggctgtagaagtgggatttcatttaaatggaagtcttttttttttaacacatcctacatacatgagtcagtaacaattgttgttgaaccgtgaatgtaattttcatgaatgataaatcctgtttgccctcttacct

SEQ ID NO: 18987 - DNA, 201 bp, Homo sapiens
aatcaacataggattgtttggtgactttgctttgaataaagtgtcttttattacttattttagtacaacacattaaaatcaaatatctcctgtagcaaaaygattcaagtccatggaactcaaataattttctaataaaaaatgcatgagacaaataaatgcactttatgttccacaagaaaaggcagtttcaacaggcta

SEQ ID NO: 18988 - DNA, 201 bp, Homo sapiens
aagaaagaaagaataggtttagagtaaaatgtcttgaaatttccagtaagaatgaagaaatcttcagcacaaatcaaaagtaatcaagctggttcaagctwgatcaggatggtttataaatatgtggtacatacaagttgaaatgtaaaaatacaatagagagaatacactgcaagctttaaagtagcctggacagacttt

SEQ ID NO: 18989 - DNA, 201 bp, Homo sapiens
agaattaacacagaccctggagagaagacatgattttgtaagaactggtggtgttgaacacagttaagcaaatgttctaagatgggtgttaagggagtttatgatattacaaatgtgtagtggactctgttgttttaggttggttgttaaaattgagggccttgatcatatgccatcattaaaaatcccagggtaaatgta

SEQ ID NO: 18990 - DNA, 201 bp, Homo sapiens
ccctttccgagtcaaagaaaggggtgatggacgcacctggaaaattgggtcactcccacccgaatattgcgcttttcagaccggcttaaaaaacggcgcaycacgagactatatcccacacctggctcagagggtcctacgcccacggaatctcgctgattgctagcacagcagtctgagatcaaactgcaaggcggcaac

SEQ ID NO: 18991 - DNA, 201 bp, Homo sapiens
tggaagccttctctgtaccaaccctatggcaaatgttctaaaacccctataaaattgggatatgggatcaggtataaggaatctacatctcttagtcattratttttcattttattttaatgagaccttgagaataaatgtacataaactgcagacacatagtattcattctcctagactgctgttgcagatgaaacttca

SEQ ID NO: 18992 - DNA, 201 bp, Homo sapiens
tgaaattctactacctgatctttaaatccttctaacagtgaaacacttttactgctcatttgtttgtttatttgttcactactcaacaattattttgactmcttaccatgatcaaggcattgttaaaagagttcttagtcaatgtagtctttggagcgatttaatctccattttgggcttatgccatttgggtaaattgta

SEQ ID NO: 18993 - DNA, 201 bp, Homo sapiens
atgggtctctggttattgaaaagttgtttttcttctaaacatctctttaaataacatgtaaaatctgaaaatattctcattttggtacacacctacttaaytataaaggagctcacggctataacaacccgacactaattcagtcaatgactgtggaaatggaaacatgtttatgggagaagattactatgaatatatatt

SEQ ID NO: 18994 - DNA, 201 bp, Homo sapiens
gtaaaaccatggtgtgaataaaatgagtctggtgtcaaatgttccatctttctttgctcaatggtttgtcctagccatgagaactccttttgattcttctytcaagacatacaactgcaaggcctggtctcttttgttcactgctgaagccccagcatgcttggaacatagtaggtgctcatgaaatatttattgagcatc

SEQ ID NO: 18995 - DNA, 201 bp, Homo sapiens
taaagctctgcaacaagacagtgggcagtttgagtcctactctgccacagccactgtgggcaagccatttactctctctgcctagagactgtctagaaaayggggctaattcctactgtgcaggtttgctgtgatgggaaataggaacacgtgtaaaatgcctaccacagtgtaaggcacacagaagctactctgtagacg

SEQ ID NO: 18996 - DNA, 201 bp, Homo sapiens
cccagagctattttagaacttagaacactcaatgacttatggtcacagattaatttttaagtaaattctgtcctcttgatttttctttgccccagactggkcttcagagccagactcagtggggctgaggcaaacgcacacctttcttgtgttctcaatgtctatagtcactttatttctctgattgtaagtgctgaatta

SEQ ID NO: 18997 - DNA, 201 bp, Homo sapiens
agtcttgtaaactctctccaaggcacaaagaaataggcgcaaagaaataagtcatagtagacttatttgtattcctctatttcagtggtctgagtcccctrtcctggccctttgctctagtatggagctatcactggtatttatcaaggagattcaaagaatagttgcaaaggagtatggtcaaatgaggctagagatctg

SEQ ID NO: 18998 - DNA, 201 bp, Homo sapiens
gtgtagaatggtggtttccacacatgacatgcagcaatctcctaggaggcttgttaatacacagactactggactgtccccatgtgtttgagtcagtaggwcagcaaaggggcctgagaatttgcatgtctcaggtgatgttgatgctgctggtccagcaaccacacttaaagaacccctggcatcgagttaaagcttcta

SEQ ID NO: 18999 - DNA, 201 bp, Homo sapiens
gggaagggaactatttccgacagagcccacactggaatgtatttaaagactgtgttcacagcctaacctcttgagtgatctattctagagaatgtgttttytggtagcaagaacatgtggggctgctcctgtgacctcagcagatagggcggcctcaacatagacactgacagtaatttcttagctgctcctgccctttca

SEQ ID NO: 19000 - DNA, 201 bp, Homo sapiens
gctctatggcataaaaatatcagctgagctgaactaggttgattttagatgacttccagaacacaaaatgaagggctgctgatggcataccccgaacatakgacatcaacatatagatggcaattatagtctagaaaataacccttcatacttactaggatattaaactgaagaaaatgaggcagatttggtcccttagag

SEQ ID NO: 19001 - DNA, 201 bp, Homo sapiens
tttattgcctttcctgatttttatatttctcttgcagatcttttccaaattagcttcattttcttgttgttgcttcagttttaactaatgactgcagttcracttcctgtaggcactggtagtaatgtgaactagttaccacatagaactgaactctgtggatgtcaaattgcaaaatttctggctctgattagaacttcc

SEQ ID NO: 19002 - DNA, 201 bp, Homo sapiens
gtatgtggttgttagatctactcctgttcgtgtgtaggcactatgaaggcaggggttgggcctggttttgcccactagcacgtatcatggtccctgatacrtagtaaatgcttaacgtttgttatagtagtaataaaaatattaatgcaaaatgataatattttgtaaacatggccactcttacattcacaatcataaaat

SEQ ID NO: 19003 - DNA, 201 bp, Homo sapiens
atggcagttctctcctaccttctaagatataaaaccatatctgtcattccatttctgatgtgaaaaggtataattgtagtaattactaacagataaaattmccatatgtagaaataagtaatctatgtgaattaataaagtaacttgtgaatattagacattatcattggggacaataatggagtgaatttgtgtataacc

SEQ ID NO: 19004 - DNA, 201 bp, Homo sapiens
gttctggcaattccatcatcttcctaaggggacctaaggggaaaaggcatcttgccataccttgttcagaatacagagaaaagcattccccgaatggctgrgtggccagttgccatggcagcataaagacgttgtgaattggtctacctgtgggaaaaatttccaaaaatagaacacagtctattttcacctagatccacg

SEQ ID NO: 19005 - DNA, 201 bp, Homo sapiens
aaggaaatcgacagtcctattttatatttgttgtcatagtatggtagttttacaccatcttctcaggggcagacttgacatttttgtggacaagaacccakgtgagaaagaaaatatctgaaatgggtgtgtcagtgggaacagggaactgggaaggctctggagaattcctctcccttttgtcccctaccttttgccctg

SEQ ID NO: 19006 - DNA, 201 bp, Homo sapiens
ttataaattacccagtctcaggtatgtctttattagcagcatgcaaacagactaatagaattttgttgtaaattcttttgctagtccacatgatagagaaycaataaaaaacaatgattggcttttctgcacggtggactaatgagaaagttatctctttcaagtcctgggctattattaattaagagagaataagaaata

SEQ ID NO: 19007 - DNA, 201 bp, Homo sapiens
caatttaacttaatgttacaaggttaattaagcacaaacaggctaccaaggaaagttatggaatcttggctcttagaaaaccacatatctcaaatggtttmggtttactcctgcctagacttaagagactggattaagtaggtcccagagtttgcttatagcatattatataactgatgttataccctttttacttctttc

SEQ ID NO: 19008 - DNA, 201 bp, Homo sapiens
atctcctaggaggcttgttaatacacagactactggactgtccccatgtgtttgagtcagtaggtcagcaaaggggcctgagaatttgcatgtctcaggtratgttgatgctgctggtccagcaaccacacttaaagaacccctggcatcgagttaaagcttctaggctcaaatccatgttctacctcttaaatgctacag

SEQ ID NO: 19009 - DNA, 201 bp, Homo sapiens
tggagttaatgctgagtgttaatgctgaatggggaaggaaggaaagagaaagcaattcttgacacatgaagcaccagcatgattattcaaggtaggagagsgaggacagaacattcgctggacctgaaatgaggagcgcagagctcagttctagaagaagcactggaggaaggaccacccacaagaagccccaaccatacc

SEQ ID NO: 19010 - DNA, 201 bp, Homo sapiens
catttaaattatgaaaatctcagtggtgtatgacttccactctgcaatttttgaagttcagaccaatgatgtgcagcaaacctgctttgaggaccaatctygctgagaaactgaaggtttataagaagacttttgagcctatagcttagcttatgtgtgttcagtgcacttcatatcattttgagaataatttatgaatcc

SEQ ID NO: 19011 - DNA, 201 bp, Homo sapiens
tcgcttacctgcattcccctccaatttcatcctcatcattgtcactgcacttctcatactgaagcagcatccagtgttcataggactgccttccccatgtrggggactcatcaaggaccaggaccttgcctcactctgattctacctccagaactaacggagttccagtcttggagtcagtactcaaaaagggtgactgaa

SEQ ID NO: 19012 - DNA, 201 bp, Homo sapiens
gatcaatgaatcagcaattaaacatatcagcaatcaatgatgctattaaggaccctatcataaaacatccacgtagaggcagagaataattagaaaaaatmagaaattaatctgcaatctcaggttctagagctctgccatccattgtcatcaacattccttaagatcataaatgtcaaaaaaaaaaagagctaatttgat

SEQ ID NO: 19013 - DNA, 201 bp, Homo sapiens
tgttccaacggtaataaaacatgattgataacagactgcttatttacaatgtttacactatggccacaaggatttcctctgttaacttttggaaaagtagkcattacctgtgtgtgttttcaatgggaatcagaatttcctctcattttttctataaagcttttctatccacatactgagtcattgtgtcagaaacatcat

SEQ ID NO: 19014 - DNA, 201 bp, Homo sapiens
tggtagtgaacaagcagacagctgaaggagtaaaaattctaggatttttgtttacatcttcattatttccctatgcccaatgcatttcccagctgattttsatgaatgctccctcctctgttcatctcttattccctctcattatccttccgacaggataatgtccttccattgtccatttttttctcattactctcttat

SEQ ID NO: 19015 - DNA, 201 bp, Homo sapiens
caaaattattttttatggcttattttcctctttgtttaaagaaagaaacaagctgcggtgacatccattccattttaaacaaacacttgtattattccacyattaaatgggctgacatcataagctcctccgtgttctgaaagatgcttagctctagtccatggttacatactttatgcattacatgaaataaaatacctc

SEQ ID NO: 19016 - DNA, 201 bp, Homo sapiens
caccattaaatgggctgacatcataagctcctccgtgttctgaaagatgcttagctctagtccatggttacatactttatgcattacatgaaataaaatamctcaagatttggaaaatatttattttaaaaacagcaatcaaattgtctgtaatcacattttctgcttggctttgaaagctgcattattcaatatgccagt

SEQ ID NO: 19017 - DNA, 201 bp, Homo sapiens
aaaatacctcaagatttggaaaatatttattttaaaaacagcaatcaaattgtctgtaatcacattttctgcttggctttgaaagctgcattattcaatawgccagtggtcttttccataatggcaacatattggaaattcatgctgctctaatacatctgaattccttgatgtgcggcactccctataggcctgaaggaa

SEQ ID NO: 19018 - DNA, 201 bp, Homo sapiens
ctcctttcttaatttttacgtccttcattacctgcagacacatcacatttttcttattatttaaacgagctatatttagaagcaactgcactgtatttctyttcaaatatgaaagagagtttcacctttgatagcacacatctgttcttttctatgtttatgtgatggtggtaataaaagatttttcaaaaatgcctcaga

SEQ ID NO: 19019 - DNA, 201 bp, Homo sapiens
aacaacattatcagaaaattaaaatttctgtctttgcattatgaataaagaatatttatgtctaacaggaaaaaattattgcaatataagttcttgcattycacatggatgtaaaaacatccagcctcaatttggaatgatactcagaatagaaacatattcaatagtgtatgattgttagcagtccttgattattattat

SEQ ID NO: 19020 - DNA, 201 bp, Homo sapiens
tttatatcatgtaaaacactatttatgtttatataagtatgtataagcataagagatattaatatatgaaatatggttattgaaaataaaaatgtattttygaaaaaatgttcaaatttactcaaagacatttaaaattagtcatgagctcttttcagctagtttgcaatctattccactgactcattttcaatgacagta

SEQ ID NO: 19021 - DNA, 201 bp, Homo sapiens
acactttcctatatatatctagtagcaagaaactcagaaggtctggaatgacagcctcttggagatcaccatggaagaggaaggcagagctagagaaaagyaaaatccacgtgcgcccatgcccagcccctgccaggagagggaggaaggcaacagcagaacaaggggagtgacgcccctccatcttctttcttggcgctt

SEQ ID NO: 19022 - DNA, 201 bp, Homo sapiens
ttcatctttagatccatacatatttgtggatgcaaaaatggcttaatggcacaccacactgctctagttcctcggcacctcttacctacattgggataacrggcgccagcggctttccataaccccagcctcttaccgctgctatctacacagggtcctattgccagaaggattttcctacaacactgatttcgtaatact

SEQ ID NO: 19023 - DNA, 201 bp, Homo sapiens
tctttagatccatacatatttgtggatgcaaaaatggcttaatggcacaccacactgctctagttcctcggcacctcttacctacattgggataacgggcrccagcggctttccataaccccagcctcttaccgctgctatctacacagggtcctattgccagaaggattttcctacaacactgatttcgtaatacttttg

SEQ ID NO: 19024 - DNA, 201 bp, Homo sapiens
catcaaattgcactgcgaaattcacttaggccaaactagtagtttgcttgcaaacagtatgactgtgcagctagaagtgatcttaacatatatttatggayatgaattttaattaatcaatgcccatatgtcctttacatctctacgtatgtacatcaaaaacatatttacgaaatgccttctaggtgtgggcataatgct

SEQ ID NO: 19025 - DNA, 201 bp, Homo sapiens
taagtttttgaacctccaagtgaaatgaaagacaccagacattttctggataacttaggccaaaaatttttctagatcatgagtataactgctccagcatyacattttgggtacagaattcaaggcaaagtttggacatcatagtccctgtttctgttcatgtcaggaggataaaacagaaagctgataacaatagattaa

SEQ ID NO: 19026 - DNA, 201 bp, Homo sapiens
ccagagaatgccacctgtttattggcacctgatattattatagcaaaatcatcccccacagaaaaaggagcccaggatgctgggaagagtttgatgtaacyttcttaaggtcatgagctcctcagagaaggaatccaagtattcagggtccctgctctcagctgggtcctcagtgctgctcacaaatccttattcttgctt

SEQ ID NO: 19027 - DNA, 201 bp, Homo sapiens; identical to SEQ ID NO: 5163

SEQ ID NO: 19028 - DNA, 201 bp, Homo sapiens
ttataactttgtcaaatatgtttctcatatagaactgtatttgaaagataaataaatagtactgccatcaaacatatacataatgcactaatttttaatckgtaacataattcctgaaacttaaggatagaagaatgccaatgtttaaacatgtttcatcttctattattaaacattcctgttgcatgattcagagaactg

SEQ ID NO: 19029 - DNA, 201 bp, Homo sapiens
aatctgtaacataattcctgaaacttaaggatagaagaatgccaatgtttaaacatgtttcatcttctattattaaacattcctgttgcatgattcagagractgaagggaaagcaaattaaactgagaagtttattagaaaaataataagcttcctctgtacatttttagaagtaaagatattacatgtaatggtgattt

SEQ ID NO: 19030 - DNA, 201 bp, Homo sapiens
actgagaagtttattagaaaaataataagcttcctctgtacatttttagaagtaaagatattacatgtaatggtgatttttcctgaaagagtttaaattgygtcaatataatctctgatttcttttgagaagaccttcaggagtaagtatttttcagattcttttgtctctgcatgaacaagggttgatagcttgggacta

SEQ ID NO: 19031 - DNA, 201 bp, Homo sapiens
aactgaaactgcagagggaaacttggcacttttttaaaggtgtttgaagtggcaggtgaggatacacaggaggaggtctcagaagacactggggtaggtgraaaacaccttagcttttctaagccccactgttttttatagtaaaaatgggcaaaactgcttctacttaacataatgacatattgaaaatttagtgtttct

SEQ ID NO: 19032 - DNA, 201 bp, Homo sapiens
aaagaagaaaatagttcaaaatataattgtaaacaagccaaatggctgctttcaaaatttatcaaatgctaccacacaactggtcagactgcagtagtgcyacaactcctccctccaatgcctaaatatgctggcatcacttgacatctgtctattgaataaaccatgctccatatggagtgcaaggttttgagaatctgt

SEQ ID NO: 19033 - DNA, 201 bp, Homo sapiens
tctgaaatttctgccaaaaggaactaatccaaaaggaattggtttaatttacagttcaaatttatgtcacaatcaacatggagacgttatggccgacagtwaagataccttttttttttgaaagtattctaaaaatatactttctaggccctttttgtcatacctcatttatactctaacctggagaattttctcgttagg

SEQ ID NO: 19034 - DNA, 201 bp, Homo sapiens
agacgttatggccgacagtaaagataccttttttttttgaaagtattctaaaaatatactttctaggccctttttgtcatacctcatttatactctaaccyggagaattttctcgttaggaaaacatgaaattaaacaaatagagagtcattaatttctttgtaaatcttaaaacataattctaacagtagatttgagaga

SEQ ID NO: 19035 - DNA, 201 bp, Homo sapiens
gtactcacttagcaaacatcccaaatactatattattattattattttgagatataatcttgctctgttgcccaggctaaagtacagtggtgcgatctcarctcactgcaacctccacctcgtgggttcaagcgattctcctgcctcagcctccggagtggagactctggagtggctgggattacaggcacacaccaccat

SEQ ID NO: 19036 - DNA, 201 bp, Homo sapiens
catgcctggctaatttttgtatttttagtagagacagggtttcgccatgttggccaggttggtctcaaacctgacctcaagtgattctcggcctcagcctyccaaagtgctgggattacaggcatgagccaccacgcccagccctaaatactgtattattaactatagtcctcatgttgcaagttacatctctagacttgt

SEQ ID NO: 19037 - DNA, 201 bp, Homo sapiens
tttagtagagacagggtttcgccatgttggccaggttggtctcaaacctgacctcaagtgattctcggcctcagcctcccaaagtgctgggattacaggcrtgagccaccacgcccagccctaaatactgtattattaactatagtcctcatgttgcaagttacatctctagacttgttcatcctacatatcactactttg

SEQ ID NO: 19038 - DNA, 201 bp, Homo sapiens
agtgctctagtaattacagcaagcaagcaagaaatgaatggtttcctttcatctgcaatctgttttaaaacaaaatggctcattttgcacgccatgtatayatattgcagttcagttgtaatgaagtattaaatgaatggcatgatttctgaaagaaaagaataacgaaaaatacacgaaggcacagctcggtgcattctg

SEQ ID NO: 19039 - DNA, 201 bp, Homo sapiens
aaaacatgtcattttaaataactggattcaatggcaaatccttcacgacattgagtatgagtatggatttgtccattgtgaaccgaagcaaagctctgttwacatatcttttgcattttaaggaatctgagaagtctttcaatccatcatcatatccggagtataatgttttattttttacatcttcaagtactacatagt

SEQ ID NO: 19040 - DNA, 201 bp, Homo sapiens
tatagtagtacgacataggatgatatgtctcctataacattttagtatccatagcttattagttttatgcattgaattatccataacaatcactctttgtrtttaattgaactgtataaccatttttgttctagttcaacaattacataacctagctagatacttaagctgtttcagtaatcaattaatgctccatttaat

SEQ ID NO: 19041 - DNA, 201 bp, Homo sapiens
acaatgttgccttttcttcagtgctaataggaccttcctcagaaagtgatatagtacctattccccattctacataatgcaggcaacaaagctctttagaygcacgacaggaaatatgccacgtctaatatttaaaattcatattttacaggatcccattatattctattttcgggcaatgaacctgcatttgtaacaatc

SEQ ID NO: 19042 - DNA, 201 bp, Homo sapiens
ggaaatatatgtaaatatatggatatttttgcattcaagctatatttctcactccatattgatgatataaagggaaacagagagagatatagattctcatsatgatttttgtcttgtttctcaaatgtccagtatatattaaaagcaatacaacatggtagctaaaagcagcagctttggagccagtgtgctgagttcaaa

SEQ ID NO: 19043 - DNA, 201 bp, Homo sapiens
tatcttgtcagacaacttattagccgataaatgatacactcactggctgacttgagtacagagacaaaggacacattaagacagaaaaagggctgaataaraaaaaagagagaagcaagcttcctgcagcctttgggcttctgtcctgtctcatcctgctgtggagaagtgaggcctaggtgttaacatggaaaggagagt

SEQ ID NO: 19044 - DNA, 201 bp, Homo sapiens
gcttcctgcagcctttgggcttctgtcctgtctcatcctgctgtggagaagtgaggcctaggtgttaacatggaaaggagagtaaagcctaaattagaaaygcctagtctgaatttcattaccttctttaagaggcctagagcttagcatcggtatatttgcacacgtttggagaagttgtggacaggctgcagtccagaa

SEQ ID NO: 19045 - DNA, 201 bp, Homo sapiens
taagaggcctagagcttagcatcggtatatttgcacacgtttggagaagttgtggacaggctgcagtccagaagagattcgttttctttagcaatgagacyctccagttagtgcctaaggcagaaattgggggtagttatttgactctagaaaatccctaaatttgcataacgacacgattttcccttagtgttccagatg

SEQ ID NO: 19046 - DNA, 201 bp, Homo sapiens
caaatgaaatgttctatgaccactcttccttttgaactaaaaagagtgacagcccagtatgactgagaggctcaaaaccaaagccttcgctcaggacactwtctcctgtcacctggctccagttggcagactggcccaaagaagccctattcacacctcatgacaaccaacatcatcttgatccataattgaggtcagaca

SEQ ID NO: 19047 - DNA, 201 bp, Homo sapiens
taaagtttcaccaggaatggcagaaggatgaacctgtcaagtaagcacaggccgttccaaagcctagtctaggaatcattgcgccagactgggaaaagtcyttctcatctacatggtacaggaactgcagagatttctatggaaaaataatgaacacatttaagaaaagttgaaatcagagttttcttctaagagaaaatg

SEQ ID NO: 19048 - DNA, 201 bp, Homo sapiens
tactcttgagtcattagttttatccttttatatggattgcattctcagtttactgtagaggttctggcaattccatcatcttcctaaggggacctaagggraaaaggcatcttgccataccttgttcagaatacagagaaaagcattccccgaatggctgggtggccagttgccatggcagcataaagacgttgtgaattg

SEQ ID NO: 19049 - DNA, 201 bp, Homo sapiens
caatggcagaagttctatgacagaattgtgttataaagataacaggatacatataaagtaatgccataaaattttaaatatatattaaatcaaacagaacrtctaaaatattttcctactctttcagagatggcctgaaacttggttgtttcaaagaaagctgttggcccatctccccacttcacctgactcccattccca

SEQ ID NO: 19050 - DNA, 201 bp, Homo sapiens
catgaatgttacttattatttatatcaaattgagctaatgcatggagcacacaggcactgtttatcaagatctctctacccctctggataacacagacaaytgaaaaagcatgatttgaacaataaagtgagaaatacacacaaaagtgattacctccaaaatggaaaaataaatgtgtttattttgtgttataaaaatat

SEQ ID NO: 19051 - DNA, 201 bp, Homo sapiens
cctaacaagtagttcatattagcaattattatgactattactattattactatatttttagaaaaaccattatgaaagaatttaaaaattcagagagctgmagtatttatgtgtgagtgctgacaagatcatattagaatattgcatacgattttaagagtgacgaggccaacgaaaattgaaatgcaaaatggcaaaggt

SEQ ID NO: 19052 - DNA, 201 bp, Homo sapiens
tgagttaagtgctattatccactttttctgcaataagagaacacaaatatatttctcctagagacacaactcctattaaaaacaaattggagttaatttaraagagcagcagggtttttgacaaagcatcattatgtatgtcacctccattagcttctgtgatatggctcaggttgcccggtatgtgtgcctatctgcata

SEQ ID NO: 19053 - DNA, 201 bp, Homo sapiens
tggaatggaggaatggtatttataatgctaaatttacaaacatgagagaaattagtaatactatggttatcaaaggaaacaggcctaattaaagaaataastgctacaaaaccatatgcaactcaaagcagaaaaagacaattcaaatttaatgaatgcctttaatattaattacagaattcttaacaatacattgggaca

SEQ ID NO: 19054 - DNA, 201 bp, Homo sapiens
atagacatcaatttttcatattactgctacttctgccccaagactttggaagactaggcacaaatatactcctttagaagtcttgtaattttactgatagyttttctctataaaaatagccatactcagaaaataaatggatttatctaaaaaggaggatcaactacacattgtaattaattgtcaaatacatcaatttaa

SEQ ID NO: 19055 - DNA, 201 bp, Homo sapiens
tttgaatcccacactttcacagaaggaatgtgttcttgctgttagtttctgagtatgttctctttcctatttgcatttagacgacagattctggaagatawtttctacaagccataaagtgggggtcgtggccatagagacattttgagtattatctgtagggagttcctttgacatatgcaaaatgtataaaggatacaa

SEQ ID NO: 19056 - DNA, 201 bp, Homo sapiens
ttgatgattggctatgtgggatcatcgcataagtgcctaaataccactttagaaaagagtaaactcatcacgtcacattacatggattgatggatacactstttcctgaatagctgcagatgttcagagggagaattcaaaggggggtcatttcagaaggtagattcctgtaattgtgttgaaaggggagtagcctggacc

SEQ ID NO: 19057 - DNA, 201 bp, Homo sapiens
tttctccttctatgaatcagcattagcatgtgtgctaaggatgaaactgaactgcatgttctaaattacaatgtacatcaatggaaacagtggactgatakacaggtatacaatccacccaaacatgtttttcaattatagataaagcacaacagacttgaaggagtattatgtttaaattattttcctgccaacatcatg

SEQ ID NO: 19058 - DNA, 201 bp, Homo sapiens
tctggttctgatttaaggtgactttcctttttcacttaagagccggcttgccgtggctaaaaaggacccaagaacactttatagctctttggaccaacccyttctgcttcaaagcgggacgagctcttttattttgtagggttttatttgttctatattgtcactgtgaacccaggtcctccactacaatgaccagaatca

SEQ ID NO: 19059 - DNA, 201 bp, Homo sapiens
tcgattagctctcaattagatctccactggccacactgctgaatccagtggatgcttgatgcttgagtctcccccttacctgattctcactgtgagggccytctctcccactggttccctgacaccaccctctctgagttttactcctacctcactggcccttgatgtttccagaatcattttagggtcatccttttccac

SEQ ID NO: 19060 - DNA, 201 bp, Homo sapiens
tttaatgggtgcagtcttagaaatcaatccctaaactttcctgcattgataattcaataatctatcactatagaatatgagttttactatgcaatgcttasacagtccactaaaatgaagcgttataaattatttcaagatgtggatattgaatgattgaataggatacccactggcaaagtttcatatcagcatggagac

SEQ ID NO: 19061 - DNA, 201 bp, Homo sapiens
aaataaagcactaatgtgcatattccaacttatatgttttatagccttgtaaatgaaaagcatttagtagcaaaatcatacttcaactaaatgatctttcyaaaagtatgtaactaattgctatctttatttctccttcacataaatcccaagttacaaaacacgtacagtctgtaacatgtctgtattgagcccatttct

SEQ ID NO: 19062 - DNA, 201 bp, Homo sapiens
tactaagcacggtactaagaagtttccatgaattaccctatttaggactcacagcaaccaggtgaaactgttacagtcgccactgccatggtactcacgarggacccaaaggaacagagagggcattctccagttattcagtaagtgggtcagctgcaatttgtcacagggcgcctgatctcaaagcctatatcataacca

SEQ ID NO: 19063 - DNA, 201 bp, Homo sapiens
gaattttttttttaacatcagaaggtacatgagtagaatttaactccggaggcaatataattgacagcagacacaccatctaattgtttgacagtcagtayatctgctatattttcataaaagtaatgatatgtctaagatagtgtgaaagaaaattgaacaaaaataaaacaatcatgtggcctttcatccaatgataag

SEQ ID NO: 19064 - DNA, 201 bp, Homo sapiens
tagaatttaactccggaggcaatataattgacagcagacacaccatctaattgtttgacagtcagtacatctgctatattttcataaaagtaatgatatgkctaagatagtgtgaaagaaaattgaacaaaaataaaacaatcatgtggcctttcatccaatgataaggatgagtttaaaacctcaaaaattcaacataca

SEQ ID NO: 19065 - DNA, 201 bp, Homo sapiens
ggatataattgaatcatgcaggcaggtcttttctgtgttcttgtgatagtgaataagtctcatgaggtctgatggttttataaagggcagttcctctgcayatgctcccttgactgccaccatgtaagacatgcaattgctcctccttcactttccaccatgattgtgaggcctcccctcccatgtggaactgtgagttca

SEQ ID NO: 19066 - DNA, 201 bp, Homo sapiens
aaaaaaaacttttggtattaaaatttcaggagggaaagttttttagtttagtaatacaggagtgcctattcagaatgatggaatttttattttgttttagrgaaggaaagagtgagagatgttttgagtgtgtgtgggtagacagtggtaagaatatatgtgttcccagggacattttggcttcctaagactttgtgagcg

SEQ ID NO: 19067 - DNA, 201 bp, Homo sapiens
gtcctggtagacagaataaaatgtgttatgatttgatgtgggctagatgagctccccaaactccaaatactttggatggaatgcactattttacgcattcmttaatttgaatcaacatatccctcttttaaaatgctggggtaggggggaaaggacaactgtaaatatataaagtcagcccaaatccttcacatcttggtt

SEQ ID NO: 19068 - DNA, 201 bp, Homo sapiens
tgtaggtaaggggaacaggtgaaaacagagacccttcaggatgggaaaaaggaaagttgaaagagtttctgttagataactctgatttcttcatgaaatgraagttaagctcccttgttgaactgagaagctgagcgcttagagagactggagtgcttgaatctgaacatgattttaaatttaggaagcaactctgctttc

SEQ ID NO: 19069 - DNA, 201 bp, Homo sapiens
ttaagctcccttgttgaactgagaagctgagcgcttagagagactggagtgcttgaatctgaacatgattttaaatttaggaagcaactctgctttctcaygtgagattcatcctagatgcagtgtagctgtttctgctttagcactctttgccgtggcagagcctgggctctgtgtttctagcaaacagtgtctcactga

SEQ ID NO: 19070 - DNA, 201 bp, Homo sapiens
tattactctactatattggtttattttgctccaattgccatttaactcagcaatctgtaactgctttgtgtctacagtaattttgtaaagttataattttkcatgggaatcatgatttgccgttcaaattgctccagattacatccataatctcccccccacaaaacacagacaaacatactcctgtaattctggggaaaa

SEQ ID NO: 19071 - DNA, 201 bp, Homo sapiens
caggcctggtggctggcgcctgtaatcccaaatactcgggaggctgaggcagaagaatcgcttgaacccaggaggtggaggttgcagtgagccgagatcgmgccactgcactccagcctgggagacaaagtgagactctgtctcaaaaaatgaataggctgggggcggtgactcacgcctgtaatcccagcactttgggag

SEQ ID NO: 19072 - DNA, 201 bp, Homo sapiens
atctgcttcctctgtgttggcgtcataggcttctgttctgaaattatcctatgctggaagatgccacaactccatttttctctgcataacacagcaaattsttttgtttgggactgctctggaaagaccaccagagaggcagactgggttttaatttttgttttatttaattcccttgaggctcagtttctctgtctacaa

SEQ ID NO: 19073 - DNA, 201 bp, Homo sapiens
attctgcagcattaaactcattgttaatcaaatcagtcaagctctctctggaatttcaatttacaccttcgcaaaatattaacagtgattaatgtttgatytattcatatgtttgattattcatatacagctttatacagcttttatctctcgttgtgctcaaaaactacatattttagtcccaataggttataattaact

SEQ ID NO: 19074 - DNA, 201 bp, Homo sapiens
ctttcaaaagctgattgaactacacctgccacttcacaatgatatgttgttctttgcttcttcctcattccaccctatgccttacaaaatgctgaatatcstttgtgagcgtttgaaaatctagcaatttttttcatgaactcctatgaattctactcagtatctacttgtttagaaaaatgccagctctaccagttcttg

SEQ ID NO: 19075 - DNA, 201 bp, Homo sapiens
tcagggatccccctagtcttgcatccttcctttgagggagaaaactgaattactaatgagttaacatatatccagggcttattatgtgggcttagagatayttaattaatgaatggcccaaagttacagaaatatataatatcagatccagaactcttaaccctgcaccccagcctgatctcccagggttctttccactgt

SEQ ID NO: 19076 - DNA, 201 bp, Homo sapiens
aagaaagatactaaaattctggtcccacagaatgcttcagagtggaataaaaatttacaaaatgcctctacattgtgaaatgtgtgacttttttgtatatwtgtttaataaccatctttcctgcttgtctgtaaacactgtgattgtagacgacatatttttttttttgttcgtttatggcttctatgtgatactaaagca

SEQ ID NO: 19077 - DNA, 201 bp, Homo sapiens
gcttctatgtgatactaaagcacagaacctagtttccagtgggggtaaaataaatatttgtcgttagattgtttaagggctttccacattacaaaggaggygctttcacatttattattttattctacctccacagcctatggggattcgagaaccatttccacctgtggttgagctctgggagtctctggaaaatgacat

SEQ ID NO: 19078 - DNA, 201 bp, Homo sapiens
ggagtttgagaccagcctgaccaacatggtgaaacttcatctctactaaaaatacaaaaattaactgagctgtgatggcgtgcacgtgtaatctcagctaytgaggaggctaagtcaggagaattgcttgaacccaagaggcggaggttgcagtgagctgagatcacaccattgcactccagcctgtgcgacagaggaaga

SEQ ID NO: 19079 - DNA, 201 bp, Homo sapiens
gtatggagctatcactggtatttatcaaggagattcaaagaatagttgcaaaggagtatggtcaaatgaggctagagatctgagcatctacagaacatgcrcctcggataaccaaagatacttcctttcctaaagttattcctatatttaaattaggcatttaatttaaatataggatttaaattattgcttggtaaaata

SEQ ID NO: 19080 - DNA, 201 bp, Homo sapiens
aatttttcttaaatttaatgaattcacattttgaaatcaaagaagtacaatttactttaatttactccttttatggatttaaatcaggttttcagataggmtattttgccctctgacaggcataaggaaatacactaaggtaactgaagacccaattcaattcattttactagccatgattaggttttatcctaaactaag

SEQ ID NO: 19081 - DNA, 201 bp, Homo sapiens
ttgctttaaatgggtctctggttattgaaaagttgtttttcttctaaacatctctttaaataacatgtaaaatctgaaaatattctcattttggtacacayctacttaattataaaggagctcacggctataacaacccgacactaattcagtcaatgactgtggaaatggaaacatgtttatgggagaagattactatga

SEQ ID NO: 19082 - DNA, 201 bp, Homo sapiens
caccactggcctttgcttcttgaggtactaacattaaagagctaattgtaaccatttaaccaacatttagaaaataaatgggatctttttgtgcacagacwtccagaccaaaaaatgactcctggagaaaagttaagcccattttgatgtaggtctcttctaatgttcaagttccagttcctcccagaagcatcctaactc

SEQ ID NO: 19083 - DNA, 201 bp, Homo sapiens
actctgtcgcacaggctacagtgcatttgcacgacattggctcactgcaacctccgcctcccaggttcgagtgattctcctgcctcagcctcctgagtagytgggattacaggcatgtgccacaacacccagctacttgttgtatttttagtaaagacagggtttcaccatgttggtcaggctggtcttgaactcctgacc

SEQ ID NO: 19084 - DNA, 201 bp, Homo sapiens; identical to SEQ ID NO: 511

SEQ ID NO: 19085 - DNA, 201 bp, Homo sapiens
actttcactctatgtatgctgcaccccaatatgtctatgataaattccagaaggcaatatagatatctaccttggatacctttttatcagaaagaggttcycattgaatatatctagccagacattacagatattagctactttaatacttacaacatgatgagattaaacaagtgaaactgaggcacaaaaagttactca

SEQ ID NO: 19086 - DNA, 201 bp, Homo sapiens
cacagatccagtgaaaactgagcaaagctaacccccacacttactgcacatcctcaccagtctcaagagaagatgtcaggaggcactggagaaggaagagktgtctatttatctgctagtgtcaaggctgaacctgttgatgatacaagtcttaagtcagtctgcctccatgctgagcccagctgaatgaaactggttctg

SEQ ID NO: 19087 - DNA, 201 bp, Homo sapiens
tgccatcagtaggtttctgcgggtgactccaacactccccggacaagttaagaagtgttccatatttgagaatttgatctttcctggtctcatactttcgycaagtttaatatatgtaacccaagtgaatgatcagttcctgggttctatcattcactatacataccacctgcagatctgaggcatcatgaagtcacccta

SEQ ID NO: 19088 - DNA, 201 bp, Homo sapiens
ctggtgacagagcgagaatccatctcaaaaataaaataaaataaaataaaataaaataaaataaaaacaaaaaatccttttcaccttaagggaggaaatgycatttcagtactttagtctatccaaggtgctgggtttagtcctattaccctgcatgggccacacaataggcaagatacccattatttagttactcactct

SEQ ID NO: 19089 - DNA, 201 bp, Homo sapiens
aaaggataatttgtgaaaaaaaaaacaggctataattgctaaacatttgatgaattgtggcataatgctaaataattgttcttcatcatttttcttctgtyaaagtggcaaaattattttttatggcttattttcctctttgtttaaagaaagaaacaagctgcggtgacatccattccattttaaacaaacacttgtatt

SEQ ID NO: 19090 - DNA, 201 bp, Homo sapiens
aatgggcagcatactaagatgaagatgtttagaagaataaaattaagataaaataaagatcatgtatagttggtagaggttttttttgtaaacactgagaycttcgttgaaatgaatttttacaaatagagtaagatttttaaaatccattcttctcttgcatttcattgtcaacagaatgcttctacagttcatataact

SEQ ID NO: 19091 - DNA, 201 bp, Homo sapiens
caagaagtaccaacacttaggtaatattgagccaagactaaaacagcattttaccataaaagacttgtggctatcggcattataactatatttttaagtayattttatgttcctgccacctgtatctttacatgtattaactgatttaagcatcacaaaaccaagagttaggtattattattacctacattttacgaaaga

SEQ ID NO: 19092 - DNA, 201 bp, Homo sapiens
aagacctctctggtggtgacatttgtcactgcttctgcttcacatgtgggaggccaactaaggagatttttattacagcttacttttattttatttttttrtaaaaataaaagtagtggtttctaacatgattggcaagaattatgaaattctgctgagtcaaataacttatcttccttagaaactctttttaagtcactc

SEQ ID NO: 19093 - DNA, 201 bp, Homo sapiens
tcgtccagatattttataagatacattttattgtatagatttagggtgtacaacatgttatgatatacatatagataataaaacagttaatatagtgaagmaaattaacatatccgtcatcttgcagttacctattttgtgtgtgtgtggcaagaacagctaaaatgtactcacttagcaaacatcccaaatactatatta

SEQ ID NO: 19094 - DNA, 201 bp, Homo sapiens
ccttgcttgctcactagatttttgacaagtattaatgaaataataaaatttttctcctccaagaacctggcagagattatctcactattacaaaactttakgctgggtgcggtggctcatgcctgtaatcccagcactgtggggggccgaggcaggtggatcacctgaggtcaggagttcgaaaccagcctggcgaacatg

SEQ ID NO: 19095 - DNA, 201 bp, Homo sapiens
tttcaatgttaataatctacttgcataaatcaagcaaaaagcaagtcaaagacatggcaagctgagatataatcattttgtaattaaaaaaataacatgastcatatgggcaaatgtttaatagacatcaatttttcatattactgctacttctgccccaagactttggaagactaggcacaaatatactcctttagaagt

SEQ ID NO: 19096 - DNA, 201 bp, Homo sapiens
aaaaatagaaaaatatttttaaaaaattattttggtgggaaatcagaaaagtgaggtgtaatcatttgcacatttcacaaaatattttatgtccataattmtgatcatcatattttttgctcttattaaccaaatatatttgacaatacatcaattgttcagtaaatgggaattatgtacaaaatatggttggtagtctac

SEQ ID NO: 19097 - DNA, 201 bp, Homo sapiens
cagttgtgatagagtgctcacatgagaacttctccaccttgaaatgagaaagctgggtcaactatggaattaacaaagacagaaatacaggtagattattyctggtccaaaatattggtgaccagaagtgtttcagatttctgacatttttttttgaattttggaatatttgcattatacttaccaggttcggcaacccta

SEQ ID NO: 19098 - DNA, 201 bp, Homo sapiens
cagtggaagatgatcaaggcatctctgagcagaaaaaaacacataagactcaagttcaaaacttttctttttttttcttttttttaaacggagtttcactyttgttgcccaggctggagtgcaatggtgcaatcttggctcactgcaacctctgcctcctgggttccagtgattctctgcctcagtcttccaagtagctgg

SEQ ID NO: 19099 - DNA, 201 bp, Homo sapiens
tgaaaaggacaaaagaaaataatggtaaaatcaccaattaaatgaaaactttgtagatcattatatgtatatatatatgtgcatgtaagcatacatagacktgcatattctttaaatatgtacacatttatttactctgtatgtgcacaaaatatttttctcttgcaatgtttttatttggctaacgttaaagttatttca

SEQ ID NO: 19100 - DNA, 201 bp, Homo sapiens
gtccattaaattcagaggatttaactatcatttttgtgattatatatttatcaaaatgtgaaatatatttattagttgaaagaaaaaaagacacgttctcyggatgattttggtatttttcatattttaagttatttaaaaagggaaagtcaaatctagtattttaatgactgtaacaaatggtcaaaaaccctccaggac

SEQ ID NO: 19101 - DNA, 201 bp, Homo sapiens
gctcattgttctcctgaaaaatattttagatgaattctcctatgatttcatgacaaaatgagtttataatgcaacatttcaatgttaataatctacttgcwtaaatcaagcaaaaagcaagtcaaagacatggcaagctgagatataatcattttgtaattaaaaaaataacatgagtcatatgggcaaatgtttaataga

SEQ ID NO: 19102 - DNA, 201 bp, Homo sapiens
actgcaagctccacctcccaggttcaagtgattctcccgcctcagcctcctgagtagctgggactacaggcgcgcgccaccacgcccagctaattttggtmtttttagtagagacggggttttaccatgttggcgaggatggtcccaatctcttgccctcatgatctacccgctttggcctccaaaagtgctgggattaca

SEQ ID NO: 19103 - DNA, 201 bp, Homo sapiens
gataataacaataaaaatacacaggcacaatgaaatactcctttttgaaatatttcagatatcgaatttatgtattaaaaatgcatagaaattcatacgcmaattttcaagttaggaaaaggatgaaagaaagaaattcgcaggggcagcacaattggagaactctcaaatagttcaagcaacaacaacaataacaacaac

SEQ ID NO: 19104 - DNA, 201 bp, Homo sapiens
aatcattagtattctgagtagatggcactattaattttatgaatggaattgaaatttcactactatgttccatacggttcttaggacaagtgagtatcccmtcaagatgttatctgtgtaaaaagggtaattcttcataggtacacaaagtagttacatgtaattcacagtatgcattattttttaagtagtcttactaga

SEQ ID NO: 19105 - DNA, 201 bp, Homo sapiens
gtatcactttacattcagtgataacaattgtattgcaattgagttaagctacatggtttattttcatgtaattacacattaatgtatttaattcagacaaytatacaccaaaaccacagattccacaacttaactggtaatagctagttatgtggatcaagaattttaactactaaggttacttagtagtttctgttcttt

SEQ ID NO: 19106 - DNA, 201 bp, Homo sapiens
agattacctgaggtcaggagtttgagaccagcctggccaacgtagtgaaaccctgtctccactaaaaatacaaaaactagccaggtgtagtggcacacgcrtataggtattacataattactgtttttgaaagatttagaataatacttggggttttcattattatatttaattattatataataattataagtaatgata

SEQ ID NO: 19107 - DNA, 201 bp, Homo sapiens
taatttaaaacacagatatgaggtcatgaaaaacttttaggagtagaaaacaacattgcaaaggatgcaaaaacatgtagggtgtctaacactaaaaggckgggaattcccattattgctgacaacttagtggactatgtctttatcttatccaccatgaaggctatatctaaaccagggtgtccaatcttttggcttccc

SEQ ID NO: 19108 - DNA, 201 bp, Homo sapiens
taaagcagattgctctccccaaggtgggtgggcctcagccaattagttgaaggcttgactagaacagtaaggactgactagagtaaatgaattcctcctgmctcactgttgaggtgagacatcagtctttcactgttttggggcatgacttgaaataacattggctcttgttggacctcaaacttgccagctttcggtctg

SEQ ID NO: 19109 - DNA, 201 bp, Homo sapiens
acctacaagaactaagattactctttgtctccatttactccctgccaatgtggcaggaagaacttttctcaggttagctgggtttagatggataatcaagkttatggtttttcagatatagattatgatgctgatacatcaaagaggtgacaatagccacctcacaattgtcatctgtcctcttctaattttctcccaata

SEQ ID NO: 19110 - DNA, 201 bp, Homo sapiens
atggcctcatgatcctctgtggaccagtcttctggtcctcactctggggtttatcaagaaggccctgagcccatggggggacatgagtatgctgctccctygggacttggcctatcaagatgcttttgtgatcccagccacgtcaatttatcattcttgaacgggaatgaagaaaagttggctgagtttatttaccactct

SEQ ID NO: 19111 - DNA, 201 bp, Homo sapiens
gctgaaagtgtgctcaatggagtggagagaattgcagtggcaggaggtccacctggcatcatttggcagttgactaaatcatggaaactggtgtaagtggygtttatcaaaatggttacccaaggaaaacagtgaaggtcatagttctaagcactgtgctgtcaatatcaatgcctcctttatccagaagcagtgaagtat

SEQ ID NO: 19112 - DNA, 201 bp, Homo sapiens
aaccaagaggctaaaatgctgtagaaatttcctttcacaatttttgctggaagaatatctgcatttattcttcctaaattcaggaacaagcctcagtgacrgagtagaaaaaccctcacatttttaactttaagttaaaaatactgttagggcaaaagacacttgttgacttgttgctctatgagtgttaatttttatcac

SEQ ID NO: 19113 - DNA, 201 bp, Homo sapiens
tgaaaggcacgctaacagagcttcatgctgataatagacctagcatatttgtttcgggcatagcacacatgcttatgatgtacaaaacacttttaggatgyagcttacgtgtttacaggtgtatgaagctttataaaacatacatattttcagcacatagtgtgggaaatcctgctgtaggtaactgaattttcttcaagt

SEQ ID NO: 19114 - DNA, 201 bp, Homo sapiens
catttacctgccagcttgtcacactaaacaagacaagtatttgcctacaacatcgaaatatcaagagtgatggctgtattaatgtaagccagcaaactaargactttcaattattatttactgaaaattataataaacaaaataaaaagaatatgacagaccatgattctaatttggttaaaaattacatgttttacagat

SEQ ID NO: 19115 - DNA, 201 bp, Homo sapiens
ttacagcttacttttattttatttttttataaaaataaaagtagtggtttctaacatgattggcaagaattatgaaattctgctgagtcaaataacttatyttccttagaaactctttttaagtcactcaaagatctcgaagttaaaggtattacatgtattgtctattaagggagaaatgtactagtatatagtaattta

SEQ ID NO: 19116 - DNA, 201 bp, Homo sapiens
tttggtttttatacgttttatatacttgatcaatgttaagtatttaaggctaggaatattcttacgaatacagcattagttgcacacttaggtgttgtttracaatgggaatacattctgagaattgtgttcttaggtgattttgtcactgtgtaaacaccatataatgtacttacacaaagctagatggtatagcctact

SEQ ID NO: 19117 - DNA, 201 bp, Homo sapiens
tctctaaatcttggctggcagcccagcctgaatcatgaaaatgagaatagttgtcctaaataaaaacaatactctttaccattaaaaaagtcttcgaatgragcataacttttttgaaaaagcactaactgagcaaataggattcatttggtctatttcaagcactgatcacagaaattaagaactgcagaattaacacag

SEQ ID NO: 19118 - DNA, 201 bp, Homo sapiens
cacccagctaatttttgtatttttggtagagacagggtttgatcatgttggccaggctggtctcgaactcctgacctcaggtgatctgcctgccttggccycccaaagtgctgggattacaggtgtgagccactgtgcccagccttaactctcttttgaatcttgagtttccaaaatgcccatcagggagcagatcatgtt

SEQ ID NO: 19119 - DNA, 201 bp, Homo sapiens
ttagatttaattcactgacaaccttaatgaagaaaaagaagttttatgctccctcccaaccccattccccaaccactcccagttattaaatctatatgtgyggatatgtaggcattgaacattactaagaggttattttagaattactaacatatgaaattccaatctaccatggtttttaccattctagaaaaaacaagt

SEQ ID NO: 19120 - DNA, 201 bp, Homo sapiens
cacagcagcaatttatatagataagctttgcacctggctggagctgaggaggttttgggtaacatactctgagagtgcagggaaatttcctattgtcccayggaaggactggctcatgatgtcctctgtagcacctctatgtccctcatgcccagcaaccagcgatgagttgttgcaaagctatggccacttggaaatata

SEQ ID NO: 19121 - DNA, 201 bp, Homo sapiens
agcccaataaatgtcagttgattggttgttagaacgtcccgtggtacacagataccagtaatgagaagaggaatgacagatagtataagaaaaacccagaycacaacctatgggggttctgaggaggtgaataacacagtagctgacatgaagctcactgtctgcccagtactgctcggagggcttcagatgcacagacca

SEQ ID NO: 19122 - DNA, 201 bp, Homo sapiens
gccagactccatctcaaaagtatatatatatatatatatatatatatatatatatatatatgtaataaatttatatataataaatttatatgtaataaatktatatataataaatttatatgtaataaatttatatgtaataaatttatataataatatattttatatatataataaatttatatatgtatggtaagattt

SEQ ID NO: 19123 - DNA, 201 bp, Homo sapiens
agagcctgagaatttgattttttgctagtttgctggttgatacacattcttattaaatttgaaaaattaatgggaattcatagtgttgtcattataaattsttagacaacaggtccagtagactgcaatactttaatggagataaattttgatcaccagaattatacctccaaaataaaactgaaaaattttttcttacct

SEQ ID NO: 19124 - DNA, 201 bp, Homo sapiens
tttgctggttgatacacattcttattaaatttgaaaaattaatgggaattcatagtgttgtcattataaattgttagacaacaggtccagtagactgcaayactttaatggagataaattttgatcaccagaattatacctccaaaataaaactgaaaaattttttcttaccttcctatggtatacatttgtggaaattga

SEQ ID NO: 19125 - DNA, 201 bp, Homo sapiens
agcaacaaggtcagttttaaaagcctcacaggtcaaatgtctgacactgaacattaaaaaagaaaaaagccctaacatggtaatttctattttcgtcaaaycaccagggtccagctgaggcttcaagcagaaagaaagaaaacaccataattttgtaacatagagacaagcaattggaatgacaatatccttttaggatgt

SEQ ID NO: 19126 - DNA, 201 bp, Homo sapiens
ctctaattattttatcaaattgtttcccaaattttctgaaagtgttgacatcacagctgcatcagaagggaaactggatgccttccttgctgagacacaaycagggctacatgtgaccatgtgtatgtgtctgaagtggactgcttcctaaatgaaaaataggaaatcaagatcaatggcaaagagattacagattctacc

SEQ ID NO: 19127 - DNA, 201 bp, Homo sapiens
attgagtgctggcaagggaagcacctcatttgagactcaaatccaggctcagaaaataatgtcaaacctggaggcatctcaaaatctagaacttaggtacygcctactttgcatttggcatcatggaacttttataataaagatgaatcttataagttttctggaaaaatgagttagttgatcatgtcattttgccaaaaa

SEQ ID NO: 19128 - DNA, 201 bp, Homo sapiens
acgatatgacaaactcaaacagaaaaaatttcccatacaatctgtcattttccttttactttctgcttcttccctaaacaaacaatccatccagctcatayagaaaagcaaaatcttataaataccatttaattccttcttccttccttcttttctgctctggcccttagttaatctctagtcatagtttattttaacagt

SEQ ID NO: 19129 - DNA, 201 bp, Homo sapiens
cagtctttacaataataagaagaaaaaatgtaaaattcttccaattctggattctatccaaaaactaaaggcattcttcattctgggtaagttcaaatgtmgtttttcccactactatttcatatttatagaaaatccttagaaatgcataaggatttagaatttaaccacaattccctgcaatattttttagaaatttaa

SEQ ID NO: 19130 - DNA, 201 bp, Homo sapiens
tctgaaactttgtttttaaagcattgacctatgaattccttttaagtacagtgtcagaaattctagaatattcacttctatgtgtgaaccaaaaaggttargaacgactgacaatctagcactaagaatatattttgtctttcatgctattctctctgcattttttggttttcaagaataaacttcttttttttttttttc

SEQ ID NO: 19131 - DNA, 201 bp, Homo sapiens
catatcatctgtgcctaacaatagtgtatttccaggactttttccttttcccagtgcccacaaaacaagctattacttctccacagctctcagagctgtcrgtgtcaccacagctctgctggaaaataaggggctgtcatctttttttttttcttcagttatgcaaactttctttttactatactttatgtcatttgacat

SEQ ID NO: 19132 - DNA, 201 bp, Homo sapiens
agcattaccacatttcaagaaaacctccttaattcctacttaaggcccaaaagaaatcacctaatttgtgacttggagattgtgaagtaaaaacatatttwtagttatagttattacgtcaaacaaatatacttcattataaatgaaaaaaaatatgccaagagcactgagccatgtaatctagccatctaataaattctt

SEQ ID NO: 19133 - DNA, 201 bp, Homo sapiens
agagttagtggaaaaatccatctgtataactcaaataactcaacagttaacactcaagtgatttctgctatggccttgactgatagttgtacaggatggtrtagaaagtctccatggtttcttgaggaattaaagataattttagagttttatgatatgtaaacattatgttttatgaacatacagttttaatattttgtt

SEQ ID NO: 19134 - DNA, 201 bp, Homo sapiens
ctattcacacctcatgacaaccaacatcatcttgatccataattgaggtcagacacaggttgggtcaatcggaatcactccagagacacaaagtcctcagwgctgtatcccagcaatggttgtgctcctctgggagggtgcaagattgcccacacttctaatttaaccaggcttcatgcaatatttactatatcccactgt

SEQ ID NO: 19135 - DNA, 201 bp, Homo sapiens
ctgcccagtactgctcggagggcttcagatgcacagaccagatcaagcctcaccaccagcacgaaaactgaggtgcagagaggtggaatcacttccccacrgtcacatgtggatagtgaagggcctgccagggttcaagtgcaggcggcctcacccagacccacaggcgtacccaccactcatacggcttctcaagatccc

SEQ ID NO: 19136 - DNA, 201 bp, Homo sapiens
tgtactaacatgtgcaggcctttcaaacactttctaatcccagcaacaacctctgtttcattgcagaagtagatgaatatttggagaaagcctacatattwaaaaaaaaaaaagcctcaggaaaactttccaattgattttgcttactcttaatcatttgttctgattgctcagggtaatgaggatgacagaggttgctct

SEQ ID NO: 19137 - DNA, 201 bp, Homo sapiens
aactgaaggtttataagaagacttttgagcctatagcttagcttatgtgtgttcagtgcacttcatatcattttgagaataatttatgaatccagtttagwacacagttaatgtccaacctgtgcctgttactatgataatccctaatctttacaagagtgttgcatgcacctttcacactctcgtgagctgtgaaaatac

SEQ ID NO: 19138 - DNA, 201 bp, Homo sapiens
tggcacctataatcttacaaaatgtatttctgaaataataagacttggaagtcaaaattttactcctcgatccatgggttgcagaatggatgttatgctarcaggcacgaaaacaacattcatctccttgtacatttccaccagagcctttgggtgactaggtgccttgttagtagtggttgggaaggaatctcattttct

SEQ ID NO: 19139 - DNA, 201 bp, Homo sapiens; identical to SEQ ID NO: 5166

SEQ ID NO: 19140 - DNA, 201 bp, Homo sapiens
gcatgccttcacttccactgttttcactgcaattttctgtaaatgtgggaagtgataccccttcaaatcttaggactacaagacagtgttcgtacagcacytagcctgctgcctggcagaatgtgctcttgatgaatgcttgttttccattttctcttttccttttcttcattctcttggtgcttcacctgtggggtcgtg

SEQ ID NO: 19141 - DNA, 201 bp, Homo sapiens
aaaccagcccatttcttcacagtattaaagtggtttaacgcattgttcttgggttctgcgatattcaaaaaaggataatttgtgaaaaaaaaaacaggctrtaattgctaaacatttgatgaattgtggcataatgctaaataattgttcttcatcatttttcttctgttaaagtggcaaaattattttttatggcttatt

SEQ ID NO: 19142 - DNA, 201 bp, Homo sapiens
aggaggaagggacaggagaagaaggcaaagataagacgtaacgtatattttaatcatgataagttagaatatttgcacagttagtgtttgcgtgtatataytgaaatgtgcatgcgtgtgtatacacacatatgcatacctaactcctccacctgcttctatggaatccctgctatattaaaatatgaactgtgacctttc

SEQ ID NO: 19143 - DNA, 201 bp, Homo sapiens
gtctgctcacaaggtatagcacataagcaggcgctgtccccattctgggggtgggggttgaagggactaaagggctgggtctagatgaataaggctctacstttcagtctccctcgagggcagcctcctctaagaggctttcccggacaagcctattaaacgtagatccatccttcctaacccaagcatctttttcacagc

SEQ ID NO: 19144 - DNA, 201 bp, Homo sapiens
tttttggtaacagaagaaataaggttgggcaatgaagactttgttgtttcctagaagcaaagcattttgaaagttaagcatcaaatatagggtgataataygcatagttgtaatgctgttcacatgcacagtcacacagatccagtgaaaactgagcaaagctaacccccacacttactgcacatcctcaccagtctcaag

SEQ ID NO: 19145 - DNA, 201 bp, Homo sapiens
gagtttccatcgatgatgtcactgggttttctggaattagctaggggtgtagccagttatgcaatgattgccaagacagtccccatttcagcctcctctaytggagaccttcctctagaggtttgtttcagactcgcatagctgttgtggttgatttcctacctaagtagttttagaaatgcaccactatatgacactcac

SEQ ID NO: 19146 - DNA, 201 bp, Homo sapiens
ggactaagacaatttccctcctctattgtccaaaattgtgtttgaaacactgatcatcatgcttatctcctttttaagttggtatttggacagtatggtaygggctttagatctactggaagtgtgattccttgccataacaggtaggaggacagtcatcctcttgcatttgacaacaggccctacttttagggatgtcct

SEQ ID NO: 19147 - DNA, 201 bp, Homo sapiens
cttctcagattaagtgactagggaattccattcactccttggtagcatggaagagcctcagggaaaaaacgcaaggctgacttaatccaaaccattcagcyagaagttttgtttttctgagacaaggtcttgctctgtcacctaggctggacggcagtcgtcaatcaccactgactgcagcctcaatctcctgggctcaag

SEQ ID NO: 19148 - DNA, 201 bp, Homo sapiens
gtgataaagcaggaggccaaggaagtggagaatctataacctgctattcacaagcatctatgacaattgccttacgtggactatctcatttaatccacacyacaagaggaagaaagtatacgataacaacctttctccatttcacatatgaggcggcagctaaagtaccctgtgcctgcttctgcacctaggacgagccca

SEQ ID NO: 19149 - DNA, 201 bp, Homo sapiens
ctcatggcttggtgctgttgtcatgacagtgagttctcacaagatccggtcatttaagtctgtggcaccttccccccgaccctcttgttcctgttttcaayatgtgatgtgcctgctaccattttgccctccaccatgattgtaagcttcctgaggtccctaccaggcttcctgtacagcctgcagaactgggccaattaa

SEQ ID NO: 19150 - DNA, 201 bp, Homo sapiens
taaatgcttccttaaaacatgactgtgaggattaactaagataaggactacgaatgcattttgtcacaaatgaattcatttttgtggttgctgctcacgcygatggttctcttcggttattatccttgagttgctttccctgaccagttctggtccctggtgagccactgacacaattatgaccaaacattctggcagcca

SEQ ID NO: 19151 - DNA, 201 bp, Homo sapiens
gcatgaatgcatatgaatgcaacacaaagagaagaactggggttcagtttgggaatcaactttcatatcaattttggaaacttttatattccatgaagctstaaggtaagaatcttctgataagagaatcttctgataaagaacccagtcaaaaagttaaggctgctagtactacagtaatttcggctgtgttcacaaata

SEQ ID NO: 19152 - DNA, 201 bp, Homo sapiens
cctgagcaacatagtgatactgtgtctctacaaaaaataaaaaagaatcagccaggcatggtggtacatgcctgtagtcccagctactcaggaggctgagsccagggaatcatttgggagtttgaagctacagtcagctgtgatcatgccactgcactccagcctgtgtgacagagccagaccctgtctcaaaaaaaaaaa

SEQ ID NO: 19153 - DNA, 201 bp, Homo sapiens
cagatgctttaaaaatacctgttggatggggactgagtgtttacacttctcactgaagtaataaaatgatgcagatgatggaaaaagttgaattggtattkagactcccaatactgccctgatttcaggtttgtctctattaaaaaattaaatggagaagtttatcagctctatttagtgagtcaatataatgagcacatc

SEQ ID NO: 19154 - DNA, 201 bp, Homo sapiens
acatttaatagccagtgactactgctgttggacagcacagattatagaagagctccatcgtcacaccacattccactgggaagtgctgaaccttacccacygtctcaccaacacgggcatttgctggagtcgctttttgcttgcagcattaaaggctaggaccagtgctgtgaggaggcacaggagacgtgcagctccaga

SEQ ID NO: 19155 - DNA, 201 bp, Homo sapiens
ctatagctcatcttctgagatatcaaagtatgacttttgcccagcacagagagtggcttcccagcgagtttttggcctcatgaggggatctccacaacccyatccccagaggctgggacattccctaggctgggtgagaggaagatggctggtttcatgatggcctcatgatcctctgtggaccagtcttctggtcctcac

SEQ ID NO: 19156 - DNA, 201 bp, Homo sapiens
ttgtaatatagatggcacaagtaccaactttgaaggtacattataaaccgatgaagagtgaaaaagtagaatataaaataaatggaagtactaattctgaytggagccggaagagtctttgaaaatctggggaggagtagaccactggaactcagttctcaatcagttttaaggtcaacgacatgaaaagtcagaattatc

SEQ ID NO: 19157 - DNA, 201 bp, Homo sapiens; identical to SEQ ID NO: 5167

SEQ ID NO: 19158 - DNA, 201 bp, Homo sapiens
ctgtgttcaaaaaatgcttttcaatttctgaaaatgaattaagtgtcccttattaacaaccccaaagctttttaacaagcgcattccaaattttttttaaraagttgacttcttaggctcaaatattctcatttcatccctatgcaaatatttgtatagggaccacattagagctatctgaaaataagaagttataatgga

SEQ ID NO: 19159 - DNA, 201 bp, Homo sapiens
tcaacagttaacactcaagtgatttctgctatggccttgactgatagttgtacaggatggtatagaaagtctccatggtttcttgaggaattaaagataaytttagagttttatgatatgtaaacattatgttttatgaacatacagttttaatattttgttttcatgcatcctgtaagcataaagattatctctggtact

SEQ ID NO: 19160 - DNA, 201 bp, Homo sapiens
aggagcaagtgtgggggaagcatagctaagaaccaggtgatgagtgttgctggcgtcctcccatcatctctttctgtgaaaaaaatctcctgttctttccrattctgtaaccaaatggtgtgacctacacacacaaatctacaggcatcttgggtagagacttcttcatctggcatctcttggggcctagggtgtcagttt

SEQ ID NO: 19161 - DNA, 201 bp, Homo sapiens
ggtttgcatttctgtggcagttttcacctagccaatgatttaagtgtttaggtaggcatgctagcactccagtggtttccggaattcagcagaactgatgkgttgtagaatagatgtgtagagaggtatttgaatcagtcattcatttaacacatccccattctgtcatttactgatcacacacttttaaataatttactt

SEQ ID NO: 19162 - DNA, 201 bp, Homo sapiens
aagagttattcaaatatatttggttattaggtttattggaaaaataaaataaaaatgagtgcctcatcatttcaattttaaaatcaacaccacaaggagcrtttatggagatgaaatatatttataataagagtgctttgaaataaatgctattgagaaagcttggagaatgattatattttatttcaacagaaaaaaaca

SEQ ID NO: 19163 - DNA, 201 bp, Homo sapiens
tccataagtagtgatctttgcattgtagttcaattttatttcctaatactctttatttgtctggtttagttttaatttggaaaaggcttatatttcatttmtttttctaattagaggaccactaatgccttaaagtttgcttttaaaaaaaatcttccacggagaattggggagttgaaagcatcattcttcaatgggtca

SEQ ID NO: 19164 - DNA, 201 bp, Homo sapiens
tattgatcatgttacttgggaaagctctaataactggaacttgtcaggcaggatgaagcactagcctcctttggcatcaagttcaaagagatggtgaggcrgtggataaaattgaggcaaaggaataacaggtaactccatcctgttttaaaagccatagataactgacaatgggacttgattgaaaaaaaatcgaatact

SEQ ID NO: 19165 - DNA, 201 bp, Homo sapiens
ggatgctcaggcaggaacactgctgtaggggtgaagccccaacagacaatctctactaggtcagtgagaaggggaaatgtggggttagaagccccacacasagtcccagctgtgagaagaaagccagcatcctccagacccaaggatggtagatccattggtagctcacactctgagcctggaaaagccacaggcactcaa

SEQ ID NO: 19166 - DNA, 201 bp, Homo sapiens
ttatttattcacaaaaatgatgaggtagcaatgcaatattgtgttaaaaaaagcacaatattaaggactaagatatagtggactgcttctggatgttgtasacagaaattaaagttagagaaaaaaatcaaggtgaattggaatctcaagataagttcagaaggaaaatgaggcccttgactctgtgcctcttaggaagcc

SEQ ID NO: 19167 - DNA, 201 bp, Homo sapiens
cggatggatcaagctgaaaaatatctggcccccgacggatgaatcttattattgagacattatttattcacaaaaatgatgaggtagcaatgcaatattgygttaaaaaaagcacaatattaaggactaagatatagtggactgcttctggatgttgtagacagaaattaaagttagagaaaaaaatcaaggtgaattgga

SEQ ID NO: 19168 - DNA, 201 bp, Homo sapiens
ctaaacagtgacaaactgagtcgaattccttaacaaaggcttcaactactaacacacaatacttataactgatacttgggaacatgtaaacctctatctgygcttctgtttatcatcttagaaggagttagaaacatctcagggaccaggattaatgaaatttgttcagattccataaccattgtaacttatgcattttgt

SEQ ID NO: 19169 - DNA, 201 bp, Homo sapiens
atcatcttttaagttttttaaaggcctgggcttcttctgattttcttatattctccttccttttccaccaacctcctagggaccagcaagattacacattrcaggtgttcaggtaaatgtttgtgttgacatcgttgtagttcaagtatatgcttttgttaggtttgtgactataaaaacaacatagatcaacatgccaac

SEQ ID NO: 19170 - DNA, 201 bp, Homo sapiens
acctttcagagcgagaagggcctaagaagtgtgaagggcactgaggagtcggaacaggtgaagacaatgtgtaacacggtaccctgacctgtatagcgccsggtgggaaagcgatgaagacagaagagaaacctcaagggcaacatggttttaagcatttgtattttcaagatggaagagacatgcaacaattgttgttga

SEQ ID NO: 19171 - DNA, 201 bp, Homo sapiens
tgagaggagaggcttcaaaaaggaaagtgttcagtggatgtggccacacagagttcagtgttgacctttcagagcgagaagggcctaagaagtgtgaaggrcactgaggagtcggaacaggtgaagacaatgtgtaacacggtaccctgacctgtatagcgcccggtgggaaagcgatgaagacagaagagaaacctcaag

SEQ ID NO: 19172 - DNA, 201 bp, Homo sapiens
aaagtagaataaaacaagaaattttacttccttattcagttttatttcaatgtatgtcaatttagcatattttaaatagtctgtataatttttaaaaatgmaagaaccattctaatgttaatttggatcaatcttccaaacatatgattccaggtttctaaaaggggcccacttgagggggctttttaaaagtgaacaaaa

SEQ ID NO: 19173 - DNA, 201 bp, Homo sapiens
tttcctctattacaaggatatagacctttttccctgcaaagctattaacatatataatgcacatgtctgaaaatcatggcttctctgtcattctttggagrcctttagggacctgggtgatcgtatagtcctgaattatagccaaagtataatctgtcgtcctctagttttccagcatatttttaaaaaatcactttaagc

SEQ ID NO: 19174 - DNA, 201 bp, Homo sapiens
gtgctaaatgtactaaagagagaataaaagacttggaaatgacataggtttaaagtcctttgactcattccactgggattattgaagtgcttggggtgggkggaggtgacagcaagagtagaaaggagccagatattagtgcctattgtaattaccatgttccctatggtctgaaatgctaaaaatgaatgtttcctctat

SEQ ID NO: 19175 - DNA, 201 bp, Homo sapiens
cacccccataatcccagcactttgggaggtcgaggagggaggatcatttgaggtcaggagtttgataccagcctggccaacatggtgaaaccccatctctrctaaaaatacaaaaattagccacccatgatggtgcacgcctgtaatcccagctacttggggggctgaggcacgagaaatcgcttgaacccaggaggcaga

SEQ ID NO: 19176 - DNA, 201 bp, Homo sapiens
acaaatgagtgaaaccacatggttgctttttcaaaacagattaataacgtattaaatgttcttacgatcttaacaagttgcagtaaaaaaaaaaattccartaacagatagaagtcaaatcccataatattaaatatttgtgacaatgactaaccaaaagaacccttgttcttctttaattacagattgcctgccttccct

SEQ ID NO: 19177 - DNA, 201 bp, Homo sapiens
aaaaatgatagattgtaaataatgtaaaacagaaaatgaaaacagaacatgtttacaaaattgtaaaccaaatctgtgtttgagtgtgtgcgtgtgtatayttgtgcataaaatcatgttattaaatgactggatcaaagtattatgaatggcaatgcttcagcttctaaataatcaatgtggatcatcgaaaaccaaaga

SEQ ID NO: 19178 - DNA, 201 bp, Homo sapiens
acgcccgtaatcctggcactttgggaggccaaggcgggcagatcacgaggtcaggagattgagaccagcctggccaacacggtgaaaccccgtctctactwaaaatacaaaacattagccgggcgtgctggcacgtgcctgtagtcccagctactcaggaggctgaggcaggagaattgcttgaacccaggaggcggagct

SEQ ID NO: 19179 - DNA, 201 bp, Homo sapiens
ttatttgtcaaggaaaacacattactctttgaaaaacagaaaagttgaccttggcaaacagttagtaaaattattccctacttgatttcccttatgtacasagtgtgggagagcacatatttagtgctgctttgtggcattgtttcaaaagaactcttgttatcgtggccagaaaggagtagtgaacatctagaaaatgtt

SEQ ID NO: 19180 - DNA, 201 bp, Homo sapiens
catcaagcacaccctgatggccaacttctcagccaagtgagactgctggttggcctttctagaatgtaggaggcaaacagtaaagtcttcttcaagagcaktaagagtaatctggccagagaggatttgaattgaggtataccggcagcttttctatttgtttgtaaatgagagaagatagaggtattttaagtagataat

SEQ ID NO: 19181 - DNA, 201 bp, Homo sapiens
tgcaactattttcctaccagccactatccagcaagagcctcctagaccaaggagcctttctctgtttacaattaacaacaacaaaatatctattaaaaggwcagagtttctctcaatgaagaaagttaacacagcccagggcatccaggaagacagccaactctggtctttaatcttgcacatcaagcacaccctgatggc

SEQ ID NO: 19182 - DNA, 201 bp, Homo sapiens
aaatgattaagcaactaagaatatcatctcatttcagatgagttctccccatgtaagcttgctacaaaggagcagaattttcaggagctgctcaaggcagmactagcatttggaaggtggagcagctcacttccctggattgatcagtggtggctttctgggtgagctgagcttgggagacagcactgctttgggaggaaa

SEQ ID NO: 19183 - DNA, 201 bp, Homo sapiens
caggctggagtgcagtggcacagtctcggctcactgcaacctccacctcccaggttttttatgcttgacccaaagggtgctctagaatgtggactacaggwcaatccaggctctagacggaaaaaataatatttttaaaatataaaaccaatatccctatcctatttcaaaaggatttttgtttagacaatggtttactta

SEQ ID NO: 19184 - DNA, 201 bp, Homo sapiens
atatatatgaatgctgggaaaaaatgcatgctgagtggtcgaattacacatttttattgcttcattttccatattttctacaagcaatatgtattcctttwataatcagctgtttttgtaaatatcttcaggaaacttcaatcatcaaaacttctggaagttgttttttgttttttggagttttttggatacagagtctca

SEQ ID NO: 19185 - DNA, 201 bp, Homo sapiens
tgtaattaactctattataaacagttcatgaataggcatgagcacagaggtcattagcatatagggatcattctgatctttgcgtactctctccttccttyggcagaaagaaggcaagaaaacattttcaactacctgacaaatttccaagcttcatccagtattcccaaatgtccgagatcaggaactgttgccttttat

SEQ ID NO: 19186 - DNA, 201 bp, Homo sapiens
ctgacatttttataccatttttctttaagtgtcatgtatttcaaacagctttatagtaagagttattgctcaagagtcactgcttcctttatggaatctarggaatttggatcaatgtgtaagtggtattgtgaacacatgtatgctatttaaggatttaggccctatcattggccttgagatactcaaatgtcgaatcta

SEQ ID NO: 19187 - DNA, 201 bp, Homo sapiens
ccaataattcagttgtcttttatccagaaacgtagtctttataacatgttctgttctgtactgacatttttataccatttttctttaagtgtcatgtattkcaaacagctttatagtaagagttattgctcaagagtcactgcttcctttatggaatctagggaatttggatcaatgtgtaagtggtattgtgaacacatg

SEQ ID NO: 19188 - DNA, 201 bp, Homo sapiens
catttcttggatgaaaagaaatcatatatacaatcaaaccaaacattgtttaggtcagtgataaaactttttttaaaaaaatgttttgcttaagcacaaawatgtactctcactgactaagccattcggtatcaaaataacaccattttactcactattttgactccccaaattgcagaaatcttctgaccctttctatct

SEQ ID NO: 19189 - DNA, 201 bp, Homo sapiens
tctcaatttctccatttaccagaaagctacaaggtgctctcccccagcaatggtcttagttgaactgaatttccatatatgctgttatgtttttacatgargcaacataagagttcactgggaccgaactccatttctgccattcaccagctgggtgacactgggcaaattgcttaacatctctgttcatttcttctgata

SEQ ID NO: 19190 - DNA, 201 bp, Homo sapiens
tttcaaaatgtaacccatttcctcttcacacctgcgtaaagactggacaaaagttgaacaatgtattttaaggatgaatggcatcactcacttaaatgtcyccttcaagggaaaaatattataaacaactccttatcaaacacaagaaagcataaaaggaaaaaccaacagattaatcatatgaataatcggctacacaca

SEQ ID NO: 19191 - DNA, 201 bp, Homo sapiens
ttttccttgcattaatgtgcccatagaattccttaaaatattgccagatcaaatgcaactgaaaagaaaattctccctagttttcttttctccatatagcrtactccctttaattgggaacacttgtactacaaccaaaggggtttctaataaaatacaaatagtgtccaagtattaaagcattctgatcgctacatagta

SEQ ID NO: 19192 - DNA, 201 bp, Homo sapiens
tattatcctcactttacagaggaggaaatggcccagagaagtcatgtaactccccttgaccacacagcttcaagaggtcaaactgtcctgctggcccaggyactaactccagcatttgcctctcatcagcacatatagttgttcccctagcagttgtattcagagtattctcgaagctcaggaaaagaaaagcaggtcaga

SEQ ID NO: 19193 - DNA, 201 bp, Homo sapiens
caataataattagaacaaatacctacacggctctcattatgtgccaggtgccattcaaaggccttgcaaagaagctcattttgtccacacagcaaccctayggggtaggaatgagtatcatccccattttataagtgagcaaattgagacacacagaagttaagaaccagctcaaagtctcaaggtcaggaagtggaaggg

SEQ ID NO: 19194 - DNA, 201 bp, Homo sapiens
ccaagtccagtgttgagcaggaaagccctggaagacagctgaagagttctctgcaccctcactcaagaaaacccaaggtgaatttctaagcagcatctcaycttcacctcaccagctcaccatcatccccttttgcatttggatgtttgagagtaagggaagaaaatggcaagttagagaaagaaaaggcaataataatta

SEQ ID NO: 19195 - DNA, 201 bp, Homo sapiens
agaacatgtggggctgctcctgtgacctcagcagatagggcggcctcaacatagacactgacagtaatttcttagctgctcctgccctttcagactgaaastccttggaatcttcagggaagcacactgaaagaaaatgtacccaaacaaaaatctgcaagtggccaagattttgccttgcacatgcaccatccataaagg

SEQ ID NO: 19196 - DNA, 201 bp, Homo sapiens
agagggaagaatggggagataccagaggatgcagaatttcagttggggatgatgaaaactttgaggagatgagtggtggtggatggttgcacaacagtgtraaagtacttaatgccactgcacctgcacactgaaaaatggtttaaatggtaaatttcatattatgtgaatttttccacaataataaaaaggtcgatgccc

SEQ ID NO: 19197 - DNA, 201 bp, Homo sapiens
aactcaaaaaaaaaaaaagaaaagaaaagaaaacaagaaagaaaaaaagaaaccaaggctaagagaagttaagattcaatttggatatctctcttaagaarcctctcctcgtggccaaaacttggctatgcccatactcctcttaattccagagcatgactctcccattgtgagttggacaggatttaaaacatggtcccc

SEQ ID NO: 19198 - DNA, 201 bp, Homo sapiens
ctcatggataccctctaaggtcaatgttatctcaattttatataataagaaactgctgggcacagtggctcacgcctgtaatcccagcactttgggaggcygaggcaggtagatctcttgaggccagatctcttgaggtgggtagatctcttgaggtttcttaagagaccatcctggcaaacatggtgaagccctgtctct

SEQ ID NO: 19199 - DNA, 201 bp, Homo sapiens
tggagagatggaaaaggtctggaaaatgcatggtcttgagtacataaagagaaattggattttccccctcagttcaatgaaaagaaactaaagatttgtaygtgaatcagtggcatcatctgacttaatgcttaatgttttctctctctatcttctgggtgaaaaagggatggtaggggagtaagtggaaaatcaaggaga

SEQ ID NO: 19200 - DNA, 201 bp, Homo sapiens
tctcaactaatggcacattgaaattgtttatgtgttggttacttcattgagcttgaaaacttctaggacaagatgtacaagtttctcatcccagtgcccaytgcaggtgcctatgtttcacaccaactgggcatacatcaaccatttattgattttatataagattcatgtgcttaagtatttggccaatacttaactgag

SEQ ID NO: 19201 - DNA, 201 bp, Homo sapiens
attaaatgttgacaaccacagaaataagtaatgtttgttaatgttacttctcttaagcgcactgcacagttgctgctaaagtaatggtagtaagttgtacrttgctaatgaatctaatatttcccagccttttatttaatatttgaagaacttttcttaacaaaagccactgaagctctacgaaatggaaaaacataagca

SEQ ID NO: 19202 - DNA, 201 bp, Homo sapiens
gcttgattagtcaataacttagcaaaccttgaggttcacaaagttgtaaaattctgaattgaggcttcaggaaatttatttggttttcatcagcatacaartagataattgctcgttttgggacagaaatactttacaactaaagtactttccctcggaggaaatcgtactgtcatttgtttttattttcaaaatgaaaac

SEQ ID NO: 19203 - DNA, 201 bp, Homo sapiens
acaatttaatacatttatagaattctttaaagagaaagagagagaaaggaaaaaaaaaaaaaaaaccaaaccagtgtccctgtgattagtccagaaggagwgagggaagcaatggagaagggggagtgaagaagaggtggaaggtgactgctgaaggctttcgtgattaccaaaattccattggctagttccctgtttgca

SEQ ID NO: 19204 - DNA, 201 bp, Homo sapiens
ggagctaggaatgaaaggccagtatatctgaacagtgcctgtggtggtcttgaccgttggctcactttgcctagacaaatgctgtcttgaaggatgacagyaaaacccagcttacagtttggaattgagaccttcactactccagtgggaggtgaaaggtgaaaagcttctatgaaaagcacacacaccattctcaaatgg

SEQ ID NO: 19205 - DNA, 201 bp, Homo sapiens
atgtgagagctttatgtacactgtcatttaaaccacacaactctataacaccggctttctagaccccatttacaaatgaagaaatgaaagaggtcatgtaycttccctaattccacacagctaacagccaacgggatttaaacccatgcacattcagctccgtaattcttgctttttcctttacctcacactgcctcgata

SEQ ID NO: 19206 - DNA, 201 bp, Homo sapiens
caaccgtcacacctggattcataccatctttttattaacttttcctgaaactttctattaaattttattaggtgataaaagctacaatatttccttgtggwtctataacagaagagaaaggagaaaaatcacccaaatcatcatttagtcagtctgtatgtgagaaatttttgaagtctacatgtaatgttattttttgtt

SEQ ID NO: 19207 - DNA, 201 bp, Homo sapiens
accattacattatgtaccatacttttacattaccataccctttataagtatagtaaacttcccattgtaaataaaaatgcattttgatagttatcaagttyacttaaagttgtatctatagaatatagtttaggcaatagtaatcattcctatgtacaaaagaagcttttccttttattaaaggaatagagttccagcctg

SEQ ID NO: 19208 - DNA, 201 bp, Homo sapiens
tatatatgatatttatatttgaccatataaaatggaatgagagtatgcataatatgtgtgtgtttctactttggaatcattacagattatcatttcactcrgtgagcagtgtatttcatatattctacaattcggccatgtaacacttagaagttgatttgctttgcaaaatatttttctcctgatggaactcagctgcat

SEQ ID NO: 19209 - DNA, 201 bp, Homo sapiens
ggaactgggaaggctctggagaattcctctcccttttgtcccctaccttttgccctggcagttgggcttagcaacacagaggagctctcaagttttatttmaatatcaggaagattccagaatagcgtttcccaaagtcggttccacagtatggatagtatgtcacgctccaatagattaagtaagttgggacatgcaagg

SEQ ID NO: 19210 - DNA, 201 bp, Homo sapiens
atgtttttaaaacttaagtaaaaggaataaacaagaacaattacgttgaatatgtgatagacagtataataagccatgcttcttacaccagtttttaactkcaattcaccaggtaatattattctgagtattatattacaaactcggaacaggtgtctagagctatttttctacacttttaaatgttaactctttctccct

SEQ ID NO: 19211 - DNA, 201 bp, Homo sapiens
ctcttagaaaaccacatatctcaaatggtttaggtttactcctgcctagacttaagagactggattaagtaggtcccagagtttgcttatagcatattatwtaactgatgttataccctttttacttctttcatgcatgggtgaggcacacatttgtatgaactcaagggttgaagaaaaagtacaagaactcctatatac

SEQ ID NO: 19212 - DNA, 201 bp, Homo sapiens
gcaagctccacctcctgggttcatgccattctcctgcctcagcctcccaagtagctgggactacaggcgcccgccaccacgcccagctaattttttttttwtttttttattttttagtagagacggggtttcaccttgttagccaggatggtctcgatctcctgacctcgtgatccgcccgcctcggcctcccaaagtgct

SEQ ID NO: 19213 - DNA, 201 bp, Homo sapiens
gtttctgcgggtgactccaacactccccggacaagttaagaagtgttccatatttgagaatttgatctttcctggtctcatactttcgtcaagtttaatayatgtaacccaagtgaatgatcagttcctgggttctatcattcactatacataccacctgcagatctgaggcatcatgaagtcaccctagaaatgtctgat

SEQ ID NO: 19214 - DNA, 201 bp, Homo sapiens
caaattttaaccatccttcttctgcagcctttcctgattctcaaaccagagtggtatttatccctcctttgaatcagaaaattctccattagtattactcytacatcagtttcactgtctgcctgaaatatttgcacatgtatgtactttagctactagcttatgaactcactgacagcagacactgtggacttgagtcta

SEQ ID NO: 19215 - DNA, 201 bp, Homo sapiens
atctgagtatatacattaggcttgcttttgttcgctggaaaaagaaggcatttgggaaataaaccccccaattttattgccttttaacatcttttttccayttcaaactccagaactggaaatttgacacattcaaagaaattgaaatcgcctttgttgctttcctcattgtaaattttctataatgcgtcattaggaagc

SEQ ID NO: 19216 - DNA, 201 bp, Homo sapiens
ctacgccaccggagtgaggttttcagcagcaacaacagcaactaatgtttctgaacacttctcatccaggaagtctaggtggtgctttacacaatttttaycatttaatcctcattataaattctaccaataaaatactgccgttaatttcattttgcagatgggaaaactgtggtacagaaaagaaataaaactcacgta

SEQ ID NO: 19217 - DNA, 201 bp, Homo sapiens
tgacaaacatcttgctatggattccttttgaggactgtctgacccacgtaaatggtctcagcaacaccggtttgacctgtttctggaatggtaagaatccraaccgaggtccttgcctgaaaaaatggctacaaaatacatatctgttgatttattaaatgaaggtcactaaggaaagtatgatgctgttcagttatgctt

SEQ ID NO: 19218 - DNA, 201 bp, Homo sapiens
gtgctcttgatgaatgcttgttttccattttctcttttccttttcttcattctcttggtgcttcacctgtggggtcgtggtaaagtcaccttctaacaatygctttagtttgatttatttatatatcacttccttagtgtctgtttcataaaattttttatttttttacaggagtagcattatgccttgaagctagtagat

SEQ ID NO: 19219 - DNA, 201 bp, Homo sapiens
acaggctaccaaggaaagttatggaatcttggctcttagaaaaccacatatctcaaatggtttaggtttactcctgcctagacttaagagactggattaastaggtcccagagtttgcttatagcatattatataactgatgttataccctttttacttctttcatgcatgggtgaggcacacatttgtatgaactcaagg

SEQ ID NO: 19220 - DNA, 201 bp, Homo sapiens
taacaatgctccaagtggctgatatttattcacttcttcctcattacatgcactttccagtgacaactcattttataaaacagggtgatgtaatgaggggygagcggcagggcaggagcaaggtgccacttacggctagagtttccgagcagtgacatttgagctgagacctgaatgtgaagatctggggcaagcgtgttc

SEQ ID NO: 19221 - DNA, 201 bp, Homo sapiens
atgttgggggggaaataaaaaaatacataggtaaataaataaaagtagtgtttggcacttttaggtaaatattatgaatgattctgtccatgaaattataycatatgctggtgttatttaaatattctctagagatattaaactacacaggtaatattaattcttacaacttccaacaacatgggacagtcaactttgggg

SEQ ID NO: 19222 - DNA, 201 bp, Homo sapiens
tgattttggtatttttcatattttaagttatttaaaaagggaaagtcaaatctagtattttaatgactgtaacaaatggtcaaaaaccctccaggacttcrtaccttttctcctacacagtgtgtattgctgctggcacaaagaagtatataaatggctaatataaaaagacaaataatattatgtttctgtaggtaatgc

SEQ ID NO: 19223 - DNA, 201 bp, Homo sapiens
ttctctctttctttctttcttttttttgacagagtctcactctatcacccaggctggagtgcagtggtgccatctcggctcactgcaacctccgcctcccrggttcaagcgtttctcctgcctcagcctcctgagtagctgggactacagaagtgtgcctccacacctggctaatttttgtacttttagtagagacagggt

SEQ ID NO: 19224 - DNA, 201 bp, Homo sapiens
ttgggccccaccctgaaacagttagacccaatatcattgaggtggagcccagggcattttgccttctgatgagcactcaggtttgacaacacaagtcttcytgctattcaaaatgtggatcctgcaatacctaggtgatgggttgataggtgcagcaaaccaccatagcacacagttacctatgtaacaggcctgcacgtc

SEQ ID NO: 19225 - DNA, 201 bp, Homo sapiens
gcaaaattattttttatggcttattttcctctttgtttaaagaaagaaacaagctgcggtgacatccattccattttaaacaaacacttgtattattccaycattaaatgggctgacatcataagctcctccgtgttctgaaagatgcttagctctagtccatggttacatactttatgcattacatgaaataaaatacct

SEQ ID NO: 19226 - DNA, 201 bp, Homo sapiens
tttaaacacatctaaagggaaaattttcatagacaaagtttcatatctgttgtccgtactacaaagactacaagagctggaaacatggacccaaacagtcwgttggtgccttggtactactccaaaaagactggatgtttatatgctcaactgtctttttaaccaaggaactactgcatcctgatgcttctactacattct

SEQ ID NO: 19227 - DNA, 201 bp, Homo sapiens
aagcatgttttctagaagggaagaatgaaagcaaaacactctgtaagagaaggtggagagtgcacaagtcttactgtgggcccagacggggatcatggctkaattatgtgaaagcttaataactctctgagacaaaattgaaagggaaaaggaacttggaacaaattcattgtgaggcataaacactgagtagacatcgtt

SEQ ID NO: 19228 - DNA, 201 bp, Homo sapiens
tgcaccactgcactccagcctgggtgacagagaaagacacagtctctaaacaaataaataaaaataaaataaaattgaaaattttatctttgttttccttyccttttggcatgccttcacttccactgttttcactgcaattttctgtaaatgtgggaagtgataccccttcaaatcttaggactacaagacagtgttcgt

SEQ ID NO: 19229 - DNA, 201 bp, Homo sapiens
ggtctgaaatgctaaaaatgaatgtttcctctattacaaggatatagacctttttccctgcaaagctattaacatatataatgcacatgtctgaaaatcayggcttctctgtcattctttggagacctttagggacctgggtgatcgtatagtcctgaattatagccaaagtataatctgtcgtcctctagttttccagca

SEQ ID NO: 19230 - DNA, 201 bp, Homo sapiens; identical to SEQ ID NO: 5168

SEQ ID NO: 19231 - DNA, 201 bp, Homo sapiens; identical to SEQ ID NO: 5168

SEQ ID NO: 19232 - DNA, 201 bp, Homo sapiens
agagttgtaaaatttaatttctctaaaccaatgtaacagcagaaaatgtatctaaaacttaaaactttttaacaaagggataattcattccagcctttttytttctattaaaaaaaaattgcatgaagtcaaagtgctaaccaagctctcctgtgcacactagctcctgattagggaagtggggaagcaggagggggaggt

SEQ ID NO: 19233 - DNA, 201 bp, Homo sapiens
tatacaatgtcagatatatatagatagagatagagatagatataaatctgacactgtttcttaactgagcaggtaatcctccagaaaggaaagtctctacrggacctacaatttggaacatatccaaaatacaaaaatagattggttttctcgaatagtgaaatagttctctaaaacaaggtgactcctgttgtaggcacc

SEQ ID NO: 19234 - DNA, 201 bp, Homo sapiens
tagagatagatataaatctgacactgtttcttaactgagcaggtaatcctccagaaaggaaagtctctacaggacctacaatttggaacatatccaaaatmcaaaaatagattggttttctcgaatagtgaaatagttctctaaaacaaggtgactcctgttgtaggcacctcttaaaaattaccataaactggtatatac

SEQ ID NO: 19235 - DNA, 201 bp, Homo sapiens
tttggaacatatccaaaatacaaaaatagattggttttctcgaatagtgaaatagttctctaaaacaaggtgactcctgttgtaggcacctcttaaaaatkaccataaactggtatataccattttgattttccttcaaatatatgcagagaatcaaaatcatgattgaaattccaaccgtcacacctggattcataccat

SEQ ID NO: 19236 - DNA, 201 bp, Homo sapiens
tatgaatccagtttagtacacagttaatgtccaacctgtgcctgttactatgataatccctaatctttacaagagtgttgcatgcacctttcacactctcrtgagctgtgaaaatacctgaagagactacctttattaaaaaccattataaaggtactctatgactctaattttcaatatttgagaatcacataacagatt

SEQ ID NO: 19237 - DNA, 201 bp, Homo sapiens
agctgtgaaaatacctgaagagactacctttattaaaaaccattataaaggtactctatgactctaattttcaatatttgagaatcacataacagattttwcaatacatattttatctggtcagtctctgaattttacagttggagaaggcaactctgagaagttaagtcatctgctcgaaatcccaccaccacttagtaa

SEQ ID NO: 19238 - DNA, 201 bp, Homo sapiens
agtccaccctccacggaggctcaccattatccaatcgggaaggtaggactacacataaagtaagcagcaaagtttacgttcttagccaggcacataggacyttcaagcataaagggatcccaacctacacttctagccttctctatagccattctaacctgataaatgccacattttaaacacacctactgatcacaccgc

SEQ ID NO: 19239 - DNA, 201 bp, Homo sapiens
tcccctccaatttcatcctcatcattgtcactgcacttctcatactgaagcagcatccagtgttcataggactgccttccccatgtaggggactcatcaargaccaggaccttgcctcactctgattctacctccagaactaacggagttccagtcttggagtcagtactcaaaaagggtgactgaatagaattgaactgg

SEQ ID NO: 19240 - DNA, 201 bp, Homo sapiens
tggagtcagtactcaaaaagggtgactgaatagaattgaactggttgtaagcaatgcaccacgtgagtgtaaacacacaggactacagctttatcgaggtkcaagtttcaagagtggcaaaaaaatgagaccaagtttatatgctctatctgcgctcattcaagggcattgacgggttctagatttgtttcacttaatttt

SEQ ID NO: 19241 - DNA, 201 bp, Homo sapiens
tttgtttcacttaattttatgttttttttttctttcagtcattcattgaacacactaaatgagccccagtggagtcaatattgaaactgcacaataaccgkgtacactttggatctgtcctctttctaggatggtccatggtcccatgtcactgtgatgacctacttcagagtgctgctggcatcttagaggacaggtttt

SEQ ID NO: 19242 - DNA, 201 bp, Homo sapiens
aaagtagtctgttttgtgcaaacaaagatcttaagtagatcttaacaattaactataaacaacacctattcttggccttattaagaatttgtccaaaaagraaaaaacccaaccaacccgcatatttattgtatttggtcaaaactaagaacaaaaaaaccagcccatttcttcacagtattaaagtggtttaacgcattg

SEQ ID NO: 19243 - DNA, 201 bp, Homo sapiens
aaatgtgaaaaataatttaataaaaactgtattctaagaagcatcggccgggcgcggcggctcacgcctgtaatcccagcactttgggaggccgaggcggscggatcacgaggtcaggagatcgagaccatcccgggtaaaacggtgaaaccccgtctctactaaaaatacaaaaaattagccgggcgtagtggcgggcgc

SEQ ID NO: 19244 - DNA, 201 bp, Homo sapiens
atcaggcaggagtccgtgacctgttcctatgatgctgtttaccatttttccccttcaaaatgtgtactcattatttaatctcaacctctatgtctttgcawactccggtgagctacagctcctttctgtcctcacagcacattcattcattcattcattcattcactcatagcaattctactttgtgtttagaagcatgga

SEQ ID NO: 19245 - DNA, 201 bp, Homo sapiens
ccgtgacctgttcctatgatgctgtttaccatttttccccttcaaaatgtgtactcattatttaatctcaacctctatgtctttgcaaactccggtgagcyacagctcctttctgtcctcacagcacattcattcattcattcattcattcactcatagcaattctactttgtgtttagaagcatggaggctagcaccagc

SEQ ID NO: 19246 - DNA, 201 bp, Homo sapiens
ttttctcttaatctgttgatttataattcctgagttatgttatgtacgttatgtaagttttccttgcattaatgtgcccatagaattccttaaaatattgmcagatcaaatgcaactgaaaagaaaattctccctagttttcttttctccatatagcgtactccctttaattgggaacacttgtactacaaccaaaggggt

SEQ ID NO: 19247 - DNA, 201 bp, Homo sapiens
ttcaactggatccatatttatctcaaaactcttgttttgaaattacctactttcttttctgtgtgtgtgtgtgtgtgtgtgtgtgtgcatctgtgtgtgtstgtgtgtaaactttatttttccagtaaatgaaattggagaaactatcaaaaagtcaactagatatgtgttaaagtacagcaaaatgttatggtagaatct

SEQ ID NO: 19248 - DNA, 201 bp, Homo sapiens
acattaggcttgcttttgttcgctggaaaaagaaggcatttgggaaataaaccccccaattttattgccttttaacatcttttttccatttcaaactccaraactggaaatttgacacattcaaagaaattgaaatcgcctttgttgctttcctcattgtaaattttctataatgcgtcattaggaagcacactctacaaa

SEQ ID NO: 19249 - DNA, 201 bp, Homo sapiens
gagtctattatatgaaagacaccacactagaaactggtcacacaaagactaagacaaatgtccttgtaaatatccatgtctctatgcaacctaagtcttakcaaacaaataaagaaaatctactctaaaattttaaaactttcgtaaacaatctgggcatccagcagatgctttaaaaatacctgttggatggggactgag

SEQ ID NO: 19250 - DNA, 201 bp, Homo sapiens
aatgactgtttaacttggacctagagaatcagaactaattggcacttatttgacagttacatacttatagaaattctaccctgttttatagcctgtcttakaaaagagggacttcaggaaaatggaatccttttcaaagtgccagaaatttaactagttgcaggaatccctactaacaataaaatggcacagacaagaaaa

SEQ ID NO: 19251 - DNA, 201 bp, Homo sapiens
aaagaactcttgttatcgtggccagaaaggagtagtgaacatctagaaaatgttcacattagtgttgggaagtgaccaaagtcttgtttccaccttttatrttatgttgtaaaaaaaaaaaaaaatcttttagaaagaaaatcatctagatttttatagtaagtagacacaggcttaatgtatgcttatctttttatcttt

SEQ ID NO: 19252 - DNA, 201 bp, Homo sapiens
gtattatgaatggcaatgcttcagcttctaaataatcaatgtggatcatcgaaaaccaaagaaaccaaagcaattggtactgattgttgagataaaaggcrtttgatgaaaagattgtatggaaagcaatgccacaaaccagttcactcctgtaaatggaggaacaaaacagcttgtatctctaaaagataacgttcagta

SEQ ID NO: 19253 - DNA, 201 bp, Homo sapiens
acctacacagtgacaaactagagttgaatttctcaactaaggctttaacaactaacacacaatccatataactgatacctgggaacatgcaaacctctatytatgcttctatttatcatcttagaaggagttagaaacatctcaaggatcagcattaatgaactttgttcagattccataagacagtatgtgcacattcca

SEQ ID NO: 19254 - DNA, 201 bp, Homo sapiens
tgcttgaaaccaaagagcttttgcagttagtgagtgtctgaggatcatgcttcttgtatttagagtccaatttactttcaggccagcacatatagtaggakactttttttttaatcttgtttttttgttttgttttgttttaaatcacagaatttcagtgcttaagacattatcattggatggtatcccagaaaattaaat

SEQ ID NO: 19255 - DNA, 201 bp, Homo sapiens
tctattcaaaaacatgctctcttcatcagggatcatagggcaaacctttttagtacccaacctaacagtctcatatttaattatattttgccttacactgktctctagttgtatcccatatgatctctcttaaattcaggaaaaaccaagtctatcaactaccaagacataatcaatcagtatcaatactagagtatcatt

SEQ ID NO: 19256 - DNA, 201 bp, Homo sapiens
attattagtaatgtcaccaaaagtcataaagcttaattctacttatgctacaacccaagcttggtgacaagtagagtctcacaggccagtttatgaaactktataacacagcagagatgggaaccaagtgacctgggcagtcactgtctctgcagtcctgtgcaagtatctgctagggagactcttcctccaggagcctgg

SEQ ID NO: 19257 - DNA, 201 bp, Homo sapiens
tccaggagcctgggacagcatcgaggcagtttgggtatctgtccctacctaaatctcatgatgaattgtaatccccagtgctggaggtggggcctggtagragggtttgggtcataggtgcagatccctcatggcttggtgctgtctttgtgacagtgagttatcacaagatcttgtcatttaaaagggcgtggcacttgc

SEQ ID NO: 19258 - DNA, 201 bp, Homo sapiens
ttgaaggttttggtcaaatctctcatttcaaaatacccaatctgatttttgaacactctccaacatgccttttctttcctcttggtttatccaaatcaaarccctccttcaagccgtgacggctgtcctaccttttctactaagttttatacccaaaccagagtataaaactctttcaactaagagttcctactgagttca

SEQ ID NO: 19259 - DNA, 201 bp, Homo sapiens
tttacaaacttttgttcctctggttctcccattacaaatttcagggtgaatcaaaccattccaacaaaacccatagagtactttttttctttttctttttyttttcttttctttttttttttttttttttttttgagacagagtttcattcttgttgtccaggctggggtgcaatggcacaatctcagctcactgcaacct

SEQ ID NO: 19260 - DNA, 201 bp, Homo sapiens
tcctctggttctcccattacaaatttcagggtgaatcaaaccattccaacaaaacccatagagtactttttttctttttctttttcttttcttttcttttyttttttttttttttttttgagacagagtttcattcttgttgtccaggctggggtgcaatggcacaatctcagctcactgcaacctccgcctgtggggttc

SEQ ID NO: 19261 - DNA, 201 bp, Homo sapiens
atctcatatatatatattttatatatatatatatattatatatacattatatatattatatattatatatacatatatatattatatattatatatacatyatatatattatatatatataataaaaaataaaaagctcttgctggtataaaaaaagttggaaaattatcagtctgatagattcctaattggtattcctgg

SEQ ID NO: 19262 - DNA, 201 bp, Homo sapiens
tatatatatatattatatatacattatatatattatatattatatatacatatatatattatatattatatatacattatatatattatatatatataatmaaaaataaaaagctcttgctggtataaaaaaagttggaaaattatcagtctgatagattcctaattggtattcctggtttccatcctgtcctcataaatg

SEQ ID NO: 19263 - DNA, 201 bp, Homo sapiens
ttagagaagagaaagatgagaattaagtaacttgccccacatcatttggttagttctgtaattaacatccagggcctgatattccatctccatcttctttstaccataccaagctacaaacaggaccatttcatgaattgatttcattgctatcactaatcatcagcagtgtaaaaggaattacctgaaagacagacacta

SEQ ID NO: 19264 - DNA, 201 bp, Homo sapiens
agatatgtaaaaaatcctaaccttttcaactgggtgaatcttttaaactttttttccccattgagaacaatgaacaatgatcttataaagcagtttgctgsggggggggggaacgtgacatttctaattcattctgaagtttttcagtagaatttttaaacttttaaaatagatcaaggctctaaactcacttgaaaagtg

SEQ ID NO: 19265 - DNA, 201 bp, Homo sapiens
taatagccttttatagccatcaggggagtgaggtaggaggcctttattaaccactagacatgattagcacattatgtgaactttactaggcaaattatctyttattgaaatataatgttggttataactaattgtaaacatgatttttaaaacttcgcagtgaaaaattcaaatgttttactaccattcagctcattattg

SEQ ID NO: 19266 - DNA, 201 bp, Homo sapiens
agatcaaactaaagaagtgtgggaaatagtgatacctcccatcaggaaagagcaaggagtttctggaattaccctcccttctcgtcttttctgctgcaccrtcaacatcgaagcacagagtaatataatgttcccattttcaaaatgaatgctgtagggagaaacatgttataaccaggaaaagctcattcaggttaatgt

SEQ ID NO: 19267 - DNA, 201 bp, Homo sapiens
agtattatggaagaactgctataattaacagtctgttggcacttccattataaaccacatttctaagcagtttataactcaactgtttttaatcagaaatwgctctttgggatgaaacttggcatgcaaggtttaaaacaaaaaattctcaaattcattagggcatatgtaagcggtatcatcttggcactgtagtttcct

SEQ ID NO: 19268 - DNA, 201 bp, Homo sapiens
tactaattctggaataaaagccagcagtaaaataaatagcattaacatatgtgggtttttttttttcttttacaaactagcattagataaaatagaaaggragggaggggaacaggaaggaaagattatgtgaggacatgcctgtttgaaatggaatgtggtaaatgttgaaaaatacatggaagaaataaaaaatcaaac

SEQ ID NO: 19269 - DNA, 201 bp, Homo sapiens
taattagtgcctgtttgaaactctcctggcggggcgcggtggctcatacctgtaatcctagcattttgggaggctgaggtgggcagatcacttgaggtcakgagtttgagaccagcctggtcaatatggtgaaaccccatctctattaaaaatacaaaaattagccgggtgtggtggcgcatgcctgtagtcccagctact

SEQ ID NO: 19270 - DNA, 201 bp, Homo sapiens
ttttttctccttttatcctaggtacaatgaggagtcactgaagggtggtcaatctaattaatatatgctaaaaaggtcacactgactcttgtgtggagaaygtatcatggaggaacaggagtcaggaggcgaggccagttaggatcactgctataatccacaaagaagatggtgctttggatcatggtggcagtggtgaag

SEQ ID NO: 19271 - DNA, 201 bp, Homo sapiens
tgccaataaatattatcaacattagtgtttaaatggttgcatattgcattgcattcatgttctttcatttattctatcagttctctattttgaacatttasgatgtttcggatattgctgttgcaaaccacaccatgacaaataacttaatccacttatttccttaggataacattctatagttctctacttatgctcaaa

SEQ ID NO: 19272 - DNA, 201 bp, Homo sapiens
tgtggagacttgctcagtttgggtaagaaaataactgggtgtctggagtgacagaaataagatgaacgaaggatgaatcccaggtttttgggccaagcatytgggagggacaatggttcctttcacataatactcactcagtgaaacttcctcactccaaaaacgtcttcttccccacttctccctgtcattcattaatca

SEQ ID NO: 19273 - DNA, 201 bp, Homo sapiens
ttgcacgccatgtatacatattgcagttcagttgtaatgaagtattaaatgaatggcatgatttctgaaagaaaagaataacgaaaaatacacgaaggcayagctcggtgcattctgagtttagctctcaaaaaagaaaaagtgcagagttttcataatagactaaaactggcatcatcataatagccttctgattaagaa

SEQ ID NO: 19274 - DNA, 201 bp, Homo sapiens
atggtgcgatcgcagctcactgcaatctccgcctcccaggttcaagtgattctcctgcctcagcctcctgagtagctgggactacaggtgcccaccaccaygcccagctaatttttgtatttttagtagaggcagggtcttgaactcttgacctcagcctcccaaagcctgcctcagcctcccaaagtgctgggattgcag

SEQ ID NO: 19275 - DNA, 201 bp, Homo sapiens
tattaagaacaggagttaagtaagactggggtggaaactaaacattagaacaagattaaattatccaacatttattttagatttttattttaaaagcagamcaatgttgccttttcttcagtgctaataggaccttcctcagaaagtgatatagtacctattccccattctacataatgcaggcaacaaagctctttagac

SEQ ID NO: 19276 - DNA, 201 bp, Homo sapiens
atcagatgactgaaaagaaaagggcttgtgaatatgcattctgaataaagcctcggaggctccacgcatctgctattttctccataaaactcctttttatrttttatccagtagcagccactgaaaactgatttttagtccaatattccttgaggtgtgaggctgactttatgaagggtttctgtactgccaactgcatta

SEQ ID NO: 19277 - DNA, 201 bp, Homo sapiens
tagcatttccttggttctttgtggattcaaagttttgttttggttttgttttttcaattgcttggccatagctttgctcactcttatttaataatactaawtatcacgagggatacacagtgcaacccacattttctatagaagtggttttctttttttttttgaaatggagtctcactctgtcacccaggctggagtgta

SEQ ID NO: 19278 - DNA, 201 bp, Homo sapiens
gtctagtggatagaggccagggatgctcccatacaccctacactgcccagaccctgtagaaaagaatgatccagactcatgtcaacagtgctgctgttgakaaacccttgtctatgtcatgggttgagtttgtggttttggtcatttttatgacaaactgtgagttgagagatgaggtcaacaatgagatgtttcacttag

SEQ ID NO: 19279 - DNA, 201 bp, Homo sapiens
aataaagcaaatatcaaagtaaagcaaatcacacaaactttttagtttctcagtccacatacaagttatgtttacactatactacagtctattaagtgtgygatagaattatgtctaaaaatgtgcataccttaattaaaacacattttattgctaagaaatgctaataatcacctgagccttcagcaagtcataatcttt

SEQ ID NO: 19280 - DNA, 201 bp, Homo sapiens
tatcttgctatttctaccacatctacagttgctgcttctatggaagtcttgaatccctcaaagtcatccatgagagttggaatcaacgtccttcaaactcytgttaatgtggacattttgaccaccttccatgaatcatcatgaatgttcttaatggcaactagaatggtaaaatcatctccagaaggtttttactttacc

SEQ ID NO: 19281 - DNA, 201 bp, Homo sapiens
acgtcagcacttgctgtttcaacttacacttttatgttatgaaaataactatgtttttctttaatactcatgaaccaacctctgctagcttccaacttttsttttgcagcttcctcacttatctcaacctttatagaattgaagagaggtaaggccttgctctggattaggccttggtttaagggaatgcagtggctgctt

SEQ ID NO: 19282 - DNA, 201 bp, Homo sapiens
ctctggggtttatcaagaaggccctgagcccatggggggacatgagtatgctgctcccttgggacttggcctatcaagatgcttttgtgatcccagccacrtcaatttatcattcttgaacgggaatgaagaaaagttggctgagtttatttaccactctatgttaatttctttggcttttgtgaaggcactgcatataga

SEQ ID NO: 19283 - DNA, 201 bp, Homo sapiens
gcttttgtgatcccagccacgtcaatttatcattcttgaacgggaatgaagaaaagttggctgagtttatttaccactctatgttaatttctttggctttygtgaaggcactgcatatagaatatgcagttttgagaggggacaaactgatataaacacattagaaaaagtagcaggaatttaataaagagaggtaaacat

SEQ ID NO: 19284 - DNA, 201 bp, Homo sapiens
ttagctatgtttagtgcatggtgttataaagtgtcctttttaccataagcctgtatcttccaggagatcaaccggatgttgagatgcagagtatccatgaragaagggtgcattcctctgtccggtgatgtgcccagtatttggtgtattttttaacagctttacacatttttgccttgctttgttcccattaactaagag

SEQ ID NO: 19285 - DNA, 201 bp, Homo sapiens
tgcagtgagccaagatcatgccactgcactccagcctaggtgatagagccagactccatctcaaaagtatatatatatatatatatatatatatatatatwtatatatgtaataaatttatatataataaatttatatgtaataaatttatatataataaatttatatgtaataaatttatatgtaataaatttatataat

SEQ ID NO: 19286 - DNA, 201 bp, Homo sapiens
ctgcactccagcctaggtgatagagccagactccatctcaaaagtatatatatatatatatatatatatatatatatatatatatgtaataaatttatatrtaataaatttatatgtaataaatttatatataataaatttatatgtaataaatttatatgtaataaatttatataataatatattttatatatataataa

SEQ ID NO: 19287 - DNA, 201 bp, Homo sapiens
gaggccgaggagggcggatcacgaggtcaggagatggagaccatcctgggtaacacggtgaaaccccgtctctactaaaaatacaaaaaattagcggagcrtggtggcaggcgcctgtagtccctgctcctcgggaggctgaggcaggagaatggcgtgaacccgggaggcggagcttgcagtgagcgagatcgcgccact

SEQ ID NO: 19288 - DNA, 201 bp, Homo sapiens
actatttttacacattgaccctttttcatgaaacttgttatactgttagttactgggtaataaaaagtatttcaatattttttaagcagaacaacttgcgyggtattattttcaatgccttttttctatttagttacttatgtatgagttatattcattgaaatgttttcttttttcaggtgcgattcaagaaaatattgt

SEQ ID NO: 19289 - DNA, 201 bp, Homo sapiens
gtatagtccattaaattcagaggatttaactatcatttttgtgattatatatttatcaaaatgtgaaatatatttattagttgaaagaaaaaaagacacgytctccggatgattttggtatttttcatattttaagttatttaaaaagggaaagtcaaatctagtattttaatgactgtaacaaatggtcaaaaaccctcc

SEQ ID NO: 19290 - DNA, 201 bp, Homo sapiens
agctggaactacagccacgagccaccatgcccagcttatttttgtatttttagtagagacagggttgcactacgttggccaggcaggtcttgaactcctgrcctcgtgatccgcccgctccggcctcccaaagtgctgggattacaggcgtgagccagcgcacctggccatcaaataggtttctatgaggcatcattaatc

SEQ ID NO: 19291 - DNA, 201 bp, Homo sapiens
agtcatacaatgatccatcccatttgcaaattcagactcaatatttgtctccatagctcaccatggcatggtatctgtaagtttgcctcattctataaaargaaactgtttttttcaaatccactttcctttaattgaactaagcattgtgcttctttactactgactatggaaacagagaactttcttgacttaattcaa

SEQ ID NO: 19292 - DNA, 201 bp, Homo sapiens
gtcatacaatgatccatcccatttgcaaattcagactcaatatttgtctccatagctcaccatggcatggtatctgtaagtttgcctcattctataaaaakaaactgtttttttcaaatccactttcctttaattgaactaagcattgtgcttctttactactgactatggaaacagagaactttcttgacttaattcaat

SEQ ID NO: 19293 - DNA, 201 bp, Homo sapiens
aattatagggggactgagacaatttggggacaagacatatcgttgttttcctttgagacttagacacatacccattcacatcactcaaacacaggcttttytaagggacacattgttttgttatttttttttcccagatgaaactgcatatttcaagtagtcttcatattcatcctactcccaactttactcacctagctt

SEQ ID NO: 19294 - DNA, 201 bp, Homo sapiens
tgaaatggttgggtcaggtggccacaaaggtttcatgtaacatcatcaccatacatctcctctctctctctgtctctctctctctctctctctctctctcwcacacacacacacacacacacacacgaccttcattgtaccccagtatactgccttcttaaaatggtacattgaatatacaggcccaaccttctgtgggca

SEQ ID NO: 19295 - DNA, 201 bp, Homo sapiens
tttatgatagtaaaatcattttacaccattttccctgtagtcattttaccaatctagttagattcacctaaagctaaaactgaggctgtccacagcccccmtgtgtgccctgtgttcttctccggaacgcatttactgcctccaccatgaggcctcttattagtcaatttcactcctttagctcctttccaactttggtta

SEQ ID NO: 19296 - DNA, 201 bp, Homo sapiens
ctttccaactttggttacttctcagtcttcacgcacagttcaaggtatcctagacctctggctggcctcatgatttgtacctgccttttctaagtccgaaycaacgttttttccattatccaaactgtattcctccaagccttcaaaagtagttcaggattctcctttctgtgatgtccctcataaagcagcttttactat

SEQ ID NO: 19297 - DNA, 201 bp, Homo sapiens
ttaaatttattttgaataattcacttaagtcatgcttaattgcaatggttgttctttctgattcttctcaaccccttcactgacttctcttttttctacamcgtcccacctctaagtgattccttaacatgttattctgagtcacatttcttccacccagataaaatttgccatggttttattaatgggaaatgttctcaa

SEQ ID NO: 19298 - DNA, 201 bp, Homo sapiens
tcactgacttctcttttttctacaacgtcccacctctaagtgattccttaacatgttattctgagtcacatttcttccacccagataaaatttgccatggktttattaatgggaaatgttctcaactaaaatgtacaattctgacccaaattccaagcctaagtctgcaattgcttgtgagacattactacttggacatca

SEQ ID NO: 19299 - DNA, 201 bp, Homo sapiens
caagtcctgggctattattaattaagagagaataagaaatagagggacttccacccaccaaacatggcagagtttatcagcaaatgtgggaatcaaaccayggctcttggtctttaaaagttttcaaaatctgggtcaaactttcctaaagtacttaaaaaatagttatttaaaatttctcaacatatgaataacttaaga

SEQ ID NO: 19300 - DNA, 201 bp, Homo sapiens
acttaaaaaatagttatttaaaatttctcaacatatgaataacttaagaaagagctacatgaaaataaaggtacaacaataaaatttgtgggatgcagccraagcagtgcttagaggaaaatttataccattaaatatataagaaaagaagatccaaaaatcaataacttaagcttctaccatagtaaaccagagaaagag

SEQ ID NO: 19301 - DNA, 201 bp, Homo sapiens
ccagagatttcctgagtgacttgtcattgtcacttcttgaaaggaatacacatcctgaatgccaggaagcttttttttttttttttttttttttttttggkaaaccatgatagatgagggtctattgttggccaagcatgacaaggagctgggtcctatcattaatcatactgaagaaaaagaaacttccagagtattcct

SEQ ID NO: 19302 - DNA, 201 bp, Homo sapiens
ttttattttgttttagggaaggaaagagtgagagatgttttgagtgtgtgtgggtagacagtggtaagaatatatgtgttcccagggacattttggcttcytaagactttgtgagcgctaaggtaacgttggcttctggattcgcctacttgaagcatttcagagccaagattagaaaatcagagccaaggacaagaatca

SEQ ID NO: 19303 - DNA, 201 bp, Homo sapiens
agaaactgtatacacatttttttattaccttgaattttatcatctgaattgggttaattcaggctgatattgggtcctggtagacagaataaaatgtgttrtgatttgatgtgggctagatgagctccccaaactccaaatactttggatggaatgcactattttacgcattccttaatttgaatcaacatatccctcttt

SEQ ID NO: 19304 - DNA, 201 bp, Homo sapiens
gacaggaggtcttgccttaaactctctggcctcagttttcttaccagtaaatggcctaaaggactttgattgaacaaccttatagatcaaacatttttaartgatctattttattattccattatgtggcctactaaaaccttagaaaattatacattcaaatcaactgatttcactatttttagtgtggccaataatcca

SEQ ID NO: 19305 - DNA, 201 bp, Homo sapiens
tttatccagaagttccactgctgcacttacactcatataagatatttatacagggctcttcattgcagcattgtttacaatagcaaaaaaaaaaaaaaacmaacaaaaaaccctgaaaacaaaatacccttaaacaggatactagttaattgaattatgaagaatacacacaatggaacactaggcaatgattaaaaaaac

SEQ ID NO: 19306 - DNA, 201 bp, Homo sapiens
ctggaaggtaagaatgggatactttgcagttttgaacaatgtgaatgttttactaactcaaataattaaatttagaaaaaaacagaaattttaaaatgacmtttatactataaaatatatctgtcagtaatagatggacctcccgtaagtgtcttcaaataagattttacttcctaggagggagcttatctaatggaagcc

SEQ ID NO: 19307 - DNA, 201 bp, Homo sapiens
ggtaagaatgggatactttgcagttttgaacaatgtgaatgttttactaactcaaataattaaatttagaaaaaaacagaaattttaaaatgacatttatmctataaaatatatctgtcagtaatagatggacctcccgtaagtgtcttcaaataagattttacttcctaggagggagcttatctaatggaagccatgatt

SEQ ID NO: 19308 - DNA, 201 bp, Homo sapiens
aatgttttactaactcaaataattaaatttagaaaaaaacagaaattttaaaatgacatttatactataaaatatatctgtcagtaatagatggacctccygtaagtgtcttcaaataagattttacttcctaggagggagcttatctaatggaagccatgatttaagaagtgaatttctatgtctaaaagatttgtcaca

SEQ ID NO: 19309 - DNA, 201 bp, Homo sapiens
actggagtgcttgaatctgaacatgattttaaatttaggaagcaactctgctttctcatgtgagattcatcctagatgcagtgtagctgtttctgctttarcactctttgccgtggcagagcctgggctctgtgtttctagcaaacagtgtctcactgagaagtatgatattctaatgtttttatttacacattttggtca

SEQ ID NO: 19310 - DNA, 201 bp, Homo sapiens
gaaagttgaaaagttgccatgccatgcgacaatgggtcagattgggattcaggaaatctttgctgattgcacaccctgctacggcaatctgtgcaggtacygcacaaacattgtggtgtttagttctcaaaacagctcagcgggaaaggttctattatcctccactttgtagatgaattaataaaagatctttgaaattaa

SEQ ID NO: 19311 - DNA, 201 bp, Homo sapiens
gatcatgaggtcaggagtttgagaccagcctggccaatatggggaaaccgtgtctctactaaaaatacaaaaattagctgggcatggtggcaggtacccgkaatcccagctactcaggaggctgaggcaggggaatcgcttcaaccggggagggggaggttgcactgagtggagattgcaccactgcactccagcctgggg

SEQ ID NO: 19312 - DNA, 201 bp, Homo sapiens
tcaggagtttgagaccagcctggccaatatggggaaaccgtgtctctactaaaaatacaaaaattagctgggcatggtggcaggtacccgtaatcccagcyactcaggaggctgaggcaggggaatcgcttcaaccggggagggggaggttgcactgagtggagattgcaccactgcactccagcctgggggatatagtga

SEQ ID NO: 19313 - DNA, 201 bp, Homo sapiens
ggagtttgagaccagcctggccaatatggggaaaccgtgtctctactaaaaatacaaaaattagctgggcatggtggcaggtacccgtaatcccagctackcaggaggctgaggcaggggaatcgcttcaaccggggagggggaggttgcactgagtggagattgcaccactgcactccagcctgggggatatagtgagac

SEQ ID NO: 19314 - DNA, 201 bp, Homo sapiens
gaaaccgtgtctctactaaaaatacaaaaattagctgggcatggtggcaggtacccgtaatcccagctactcaggaggctgaggcaggggaatcgcttcamccggggagggggaggttgcactgagtggagattgcaccactgcactccagcctgggggatatagtgagactctgtctccaaaataaatagatagatagat

SEQ ID NO: 19315 - DNA, 201 bp, Homo sapiens
tgcactccagcctgggggatatagtgagactctgtctccaaaataaatagatagatagatagatagagttttgattgcttggagtcttactaaattctagytgagtaaacttttttctatttttaaagtagagttagtctttggaaaagtttaaaaaagatttagagggtctatctgtataaataaaaagattatatagta

SEQ ID NO: 19316 - DNA, 201 bp, Homo sapiens
tttcatgttaaaagaaaacatgtaccttgaatttaatactgattacctataatcacaagataaactaataattgggttctaaactatagcaatatcataayattttaagaataaatttgatacaaacataaaaatattttcaggaacctttctccattaaaaatcctttatctggtaagcacatggtaaacacatacagga

SEQ ID NO: 19317 - DNA, 201 bp, Homo sapiens
ttattctacctccacagcctatggggattcgagaaccatttccacctgtggttgagctctgggagtctctggaaaatgacattcactggtgttctattgayccaacatgacaagctctaccctgtattcctgaatggctcagagataatagctatactccagtaatcacttttatttagttagttttttactcttaagcag

SEQ ID NO: 19318 - DNA, 201 bp, Homo sapiens
tgtcataaaattccttcagcctgtagcactgaaagtctaaatctcttttcataattatattctgacattcaaggcttaggaatcctctacagattgaagtrggaccaagctgctagaacccaggagggaaaagatcagtcgattgatttctctaaggtttctccgacttctccatccctcctgtatttcccttgccaccta

SEQ ID NO: 19319 - DNA, 201 bp, Homo sapiens
ttaccccaaactttattccaattccatactatttcttattgttatatgtatatgtatgtatatatgcatatactgtatatctaatacatatgtatttctcrctaatactatttttaataatgtaaggattaaattcagaaaatgcacaatttcataaagtattctatcttacataggtaagtcttcattgatagttaggtg

SEQ ID NO: 19320 - DNA, 201 bp, Homo sapiens; identical to SEQ ID NO: 5170

SEQ ID NO: 19321 - DNA, 201 bp, Homo sapiens
cttgctttgtcccccagcctgcagtacagtggggctatctccactcactgcaacctctacctcctgggttcaagcaattctcacacctcagcctcccgagkagctgggattacaggcacatgccaccacacctggctgatttttgtgtttttagtagagatgaagtttcaccatgttggccaggctgatctcaagctcctg

SEQ ID NO: 19322 - DNA, 201 bp, Homo sapiens
tcaaatatagggtgataatacgcatagttgtaatgctgttcacatgcacagtcacacagatccagtgaaaactgagcaaagctaacccccacacttactgsacatcctcaccagtctcaagagaagatgtcaggaggcactggagaaggaagaggtgtctatttatctgctagtgtcaaggctgaacctgttgatgataca

SEQ ID NO: 19323 - DNA, 201 bp, Homo sapiens
attagaacttcctaccctcccacaacttccattctttaattctcttgagtcttccatcttccttcccaattacctttaatccctctacctctctctagtcrtcgttccactgtctccaagaagatgtagactagatttcagaattcatcacttcaagcaagctttttctacaagcctctttattttgacatctttgatggt

SEQ ID NO: 19324 - DNA, 201 bp, Homo sapiens
agcagtttgtggactttgaagtgtccaggggaaggcaatgtgtgtaactttcactagttactggagtttaagaacagtatatctaactgtaaatcaaaggmctattttcagaaaaaaaatatgaagggatccacaacattcagctcaggatggaaatcaatgaagacattttgaataatggtatctgagtaacttgtttac

SEQ ID NO: 19325 - DNA, 201 bp, Homo sapiens
tccatcctactttcttctctcccttctccttctttcctttctactttttttcctttattccttcatctctcctttctttattctttttttttcttttcttscccctctttctcctttctttcttgatgagtacaagcctcccgggagcacagctctcatcttccattgtatgccctccttggcccttcagtctcctctctt

SEQ ID NO: 19326 - DNA, 201 bp, Homo sapiens
catacacattatactatataaagtgaacagttacaatataagtacagttcaatgatgacaataccagacttccaagtcccagttttaagtattctgtcccmttgctagttagataaagtaacctgacatttggttctaacactgtttgatttcacttaatatttgtagaaacctgtctgtttctcatttctactttattcc

SEQ ID NO: 19327 - DNA, 201 bp, Homo sapiens
cctctctctctctgtctctctctctctctctctctctctctcacacacacacacacacacacacacacgaccttcattgtaccccagtatactgccttctkaaaatggtacattgaatatacaggcccaaccttctgtgggcacaaacaacttttacgcttaacacatctatatttaaaggatttctcaggggctttaaag

SEQ ID NO: 19328 - DNA, 201 bp, Homo sapiens
cagtcagtacatctgctatattttcataaaagtaatgatatgtctaagatagtgtgaaagaaaattgaacaaaaataaaacaatcatgtggcctttcatcyaatgataaggatgagtttaaaacctcaaaaattcaacatacaatcaaattatactttaaaaaatgtggctaaaagctatctgacagtttgatttctgttt

SEQ ID NO: 19329 - DNA, 201 bp, Homo sapiens
gcctgtaatcccagcactttgggaggccgacgcgggtggatcacttgaggtcagcagttcgagaccagcctagccaatatggtaaaaccccatctctactwaaaatataaaaaaattagccaggcctggtggctggcgcctgtaatcccaaatactcgggaggctgaggcagaagaatcgcttgaacccaggaggtggagg

SEQ ID NO: 19330 - DNA, 201 bp, Homo sapiens
ctcaatgtctatagtcactttatttctctgattgtaagtgctgaattagtgttatttctcatcccactaccaccccccattgtgatatgtggaaaggaccrgagagacagctttagggtgttcatggtggaaagtgacatattcagggatgagcggatggctcatttgtctgtaccttggaatctggctggatttgatcct

SEQ ID NO: 19331 - DNA, 201 bp, Homo sapiens
atagaactcttgctttgctgtaaggtctgaggtacctttggagcaagtaagagggtgtatttctgtacaaactggcacttggcctaatttctcagtgtgakcaggcctctgcagagagagttcttgccctagaaaatgaccacagtgcccttaagcccagagctattttagaacttagaacactcaatgacttatggtcac

SEQ ID NO: 19332 - DNA, 201 bp, Homo sapiens
gattcagtcttggaattggtataccccttcatctcccacacttagttaactcgtctgaataatcaaataattacaggccaatgggaagcaaccaaacttayaaaagagctatgaagaataagtgtgccacatgctatcctacaaagcatgacaggaatacatgtaagggatttttttccctgcccctaccctggcctttct

SEQ ID NO: 19333 - DNA, 201 bp, Homo sapiens
gagaaaccagatagtcctcgcaaaggcaaatctagtaagataaaagtacaggctgcttttatacaggacaatttctacacgtctgtgcattataccaagaygttaggtttctggagggactttacccatggaccacaagcaatggggataacttcgttggtttttgggtaatcatagtggggtcccaacagtttgtcgagg

SEQ ID NO: 19334 - DNA, 201 bp, Homo sapiens
ctgaggattttcctcaggctagagaaaccagatagtcctcgcaaaggcaaatctagtaagataaaagtacaggctgcttttatacaggacaatttctacaygtctgtgcattataccaagatgttaggtttctggagggactttacccatggaccacaagcaatggggataacttcgttggtttttgggtaatcatagtgg

SEQ ID NO: 19335 - DNA, 201 bp, Homo sapiens
ggtacattgaatatacaggcccaaccttctgtgggcacaaacaacttttacgcttaacacatctatatttaaaggatttctcaggggctttaaagtgtaaytggacaagcaggtggtttaatccagtatgtttgtaacctcatgcttcattaacaaagcaggtgtctccctccaatgtttctcgcatggatgatataaact

SEQ ID NO: 19336 - DNA, 201 bp, Homo sapiens
tttggaagactaggcacaaatatactcctttagaagtcttgtaattttactgatagtttttctctataaaaatagccatactcagaaaataaatggatttrtctaaaaaggaggatcaactacacattgtaattaattgtcaaatacatcaatttaatagtggaataggttagaaatgatcagtagtaagttgattaagta

SEQ ID NO: 19337 - DNA, 201 bp, Homo sapiens
cacaccagtttcctttgaaaagaccatgatccttgagtttccatcgatgatgtcactgggttttctggaattagctaggggtgtagccagttatgcaatgrttgccaagacagtccccatttcagcctcctctattggagaccttcctctagaggtttgtttcagactcgcatagctgttgtggttgatttcctacctaag

SEQ ID NO: 19338 - DNA, 201 bp, Homo sapiens
actgcctacaaagattctgctaactgaataattgattcagatagtcttcctattttgagtatgaaagtccaaagggtgaacttaatctcaaacaataggayaggtatgagtgcaaaacattgagtttcctaaactctctgaatttttccaagagaacacactccaaaatcaccagttactaattcattttattaattcagt

SEQ ID NO: 19339 - DNA, 201 bp, Homo sapiens
cagttcattaaaaaggaacctgatgaaagaaatacaaaaacaaatgaaagctgaaatctgtgatctttagaatttcagtaaacaatttcaggaaaaaaaamccaataaattaaagcactatgacctgaaaaaggactttaaatccctgcatggtatagtaagtcaaaggagaaaaaaaaaagaaactaagaagtcaacaaa

SEQ ID NO: 19340 - DNA, 201 bp, Homo sapiens
aaaaacaaatgaaagctgaaatctgtgatctttagaatttcagtaaacaatttcaggaaaaaaaaaccaataaattaaagcactatgacctgaaaaaggastttaaatccctgcatggtatagtaagtcaaaggagaaaaaaaaaagaaactaagaagtcaacaaagtttctgaaaactaaatacaagggttgaaagggtt

SEQ ID NO: 19341 - DNA, 201 bp, Homo sapiens
taaaagaattatgatagcaagcttagaacaattggtaattatagtagtctttgcacagtagaaatctctgtaatagtctctcaagcagaagtaagtctgckaaatacctacaagaactaagattactctttgtctccatttactccctgccaatgtggcaggaagaacttttctcaggttagctgggtttagatggataat

SEQ ID NO: 19342 - DNA, 201 bp, Homo sapiens
caggaagaacttttctcaggttagctgggtttagatggataatcaaggttatggtttttcagatatagattatgatgctgatacatcaaagaggtgacaayagccacctcacaattgtcatctgtcctcttctaattttctcccaataattttgctgacttacatggcgttaagtatttgtggttcaatctcccttacttc

SEQ ID NO: 19343 - DNA, 201 bp, Homo sapiens
gttttgaggggatgtgaactgagaagactgaggataattgagtacatggtattttgtgtcttactcagttatgtaagcacacagggatgctcacaagttgmaactgtgagtttcaaaaaccatcctgagcttgaagataaagaagataaggacctctagagttaagaatgcattcgtggaacaaaatgcaaaaagatttta

SEQ ID NO: 19344 - DNA, 201 bp, Homo sapiens
gcacattaacaattttaaagagtaagagttatcaccataaaatttaacaacatagttttctagcaaaattcactacatgtacaaccattaatcaccaaaartttaactttattttttttaatgagcattaaacaataaggaaagacctgctaatcaagttggtttctagaatgatagatttgctcattgacaaccttcttg

SEQ ID NO: 19345 - DNA, 201 bp, Homo sapiens
gaccaaggattagtctgccaccaatgtgatttcaatccatcaaaacctctttctcttggaggaaaatcctatttatttctactctatctcctaagcacaaygagcagcttttctgtgtggaagatccctgccctccaagatgcagccctacccaggaaaggctgcagaaaccagcatgccaggctcactctctaaccgaaa

SEQ ID NO: 19346 - DNA, 201 bp, Homo sapiens
cattttttagaaaatcacctttttacaaacacctcactttctctttgacttcaaaagtgacaattgcagtgaggtaagaaggggactcaccatctttcaamtttaccaagaaagaaactgagacacagactaaaatgacagccctagtttctcagctggccagcagacacctcctgttcccagacagcatactctttcccc

SEQ ID NO: 19347 - DNA, 201 bp, Homo sapiens
ggtaagaaggggactcaccatctttcaaatttaccaagaaagaaactgagacacagactaaaatgacagccctagtttctcagctggccagcagacacctyctgttcccagacagcatactctttccccacccacatttgttcccataggttaaaaaaaaaaaaaaaagccctaaaataaactgagtcaggaaacactggt

SEQ ID NO: 19348 - DNA, 201 bp, Homo sapiens
accatctttcaaatttaccaagaaagaaactgagacacagactaaaatgacagccctagtttctcagctggccagcagacacctcctgttcccagacagcrtactctttccccacccacatttgttcccataggttaaaaaaaaaaaaaaaagccctaaaataaactgagtcaggaaacactggtgacaaataaatcaaac

SEQ ID NO: 19349 - DNA, 201 bp, Homo sapiens
ggaaacactggtgacaaataaatcaaactagtggttaatgccatgatatacagtctttttaattatccagcaattctattgctgtcagtgcttgtgttcayaactattcactcatttttacctattccttcatagaactattggcagagcaatgttttctcaattcttggatttccagcaggccactaggtgagaccacac

SEQ ID NO: 19350 - DNA, 201 bp, Homo sapiens
ggaatggaggaatggtatttataatgctaaatttacaaacatgagagaaattagtaatactatggttatcaaaggaaacaggcctaattaaagaaataacygctacaaaaccatatgcaactcaaagcagaaaaagacaattcaaatttaatgaatgcctttaatattaattacagaattcttaacaatacattgggacag

SEQ ID NO: 19351 - DNA, 201 bp, Homo sapiens
aatagccaggattctatttccttcccgtggttgttatttgaataatggtacagtctagatgcatagtagtttggtctgtagaatacagcaaggtcacgacraattctggagcattttcggcccctcaaacatctctcaagttaaaatgagtcccaacccattgggaggcaaacccaatgcatgctcaaaacatccaaacca

SEQ ID NO: 19352 - DNA, 201 bp, Homo sapiens
tttttctgagacaaggtcttgctctgtcacctaggctggacggcagtcgtcaatcaccactgactgcagcctcaatctcctgggctcaagggatcctccgyctcagcctccccagtcgctgggatcacaggcatgcatctccatgcccggctaattttttaatttgtagagatgatccttattatgttgtccaggctggtc

SEQ ID NO: 19353 - DNA, 201 bp, Homo sapiens; identical to SEQ ID NO: 5174

SEQ ID NO: 19354 - DNA, 201 bp, Homo sapiens; identical to SEQ ID NO: 5175

SEQ ID NO: 19355 - DNA, 201 bp, Homo sapiens; identical to SEQ ID NO: 5176

SEQ ID NO: 19356 - DNA, 201 bp, Homo sapiens; identical to SEQ ID NO: 5177

SEQ ID NO: 19357 - DNA, 201 bp, Homo sapiens; identical to SEQ ID NO: 5178

SEQ ID NO: 19358 - DNA, 201 bp, Homo sapiens
gttttattctaaacaacaagtgatcatatttttacaatgtaattgttaatagcatacaatcaactcatgataattacatttttattgacatgtaagataaytatcctacctatgacttctcagaaatcttgagattcacactcagatagctaaaatgtagggtggtaagtgatctaaatttgattaattgattcagttcta

SEQ ID NO: 19359 - DNA, 201 bp, Homo sapiens
tcaaccaaccatggcctcctttaattaggagtcctttccagacagtttcataaaagcacataattcaggaatgaaaaacgataaatacttggctaaagcaraaccatttaaatctcccaagcaaaaaacaaacaaacagaaaaaagcattaatagtgaccctggtttcatgacctttgatattataaatatatatcagtga

SEQ ID NO: 19360 - DNA, 201 bp, Homo sapiens
attccatatgaacgtattctgaaagcctatgtgtatacaacaggtttttaaagcatattagataaaacagcttaggttgtagctgatgagccatgaaaaayagatgtgtttaactatttggtatccttgcaagtatgtgctaaagaatattctctgatgtgggtttctctcgctctctccttccctttccccgcccccaaa

SEQ ID NO: 19361 - DNA, 201 bp, Homo sapiens
atgtttaataatgtcattttacaataagcattatattcttgctattttctccaaaattcagaaacaactgtatgaaccttccacctctcagaaatatatcyttccttccctcccccaccccaggccagatcttttctcaagattgcaagttatagaaaggcaattgacctcagtaaatttttccactggcttacatttttt

SEQ ID NO: 19362 - DNA, 201 bp, Homo sapiens
catgtaccatattgggttttaggcatttcagtaagataaatggcttatcaccaccactgtatcttgaccaagcagtgatagcagaaatgaatcttcaaccraagagccatttttctaagaaatgaacattcatatgtttaataatgtcattttacaataagcattatattcttgctattttctccaaaattcagaaacaac

SEQ ID NO: 19363 - DNA, 201 bp, Homo sapiens
ggaagaatatctgcatttattcttcctaaattcaggaacaagcctcagtgacagagtagaaaaaccctcacatttttaactttaagttaaaaatactgttrgggcaaaagacacttgttgacttgttgctctatgagtgttaatttttatcacaatgctatactcaatgttttaggtatcacaatacatataatcctttta

SEQ ID NO: 19364 - DNA, 201 bp, Homo sapiens
taaaatgctgtagaaatttcctttcacaatttttgctggaagaatatctgcatttattcttcctaaattcaggaacaagcctcagtgacagagtagaaaamccctcacatttttaactttaagttaaaaatactgttagggcaaaagacacttgttgacttgttgctctatgagtgttaatttttatcacaatgctatact

SEQ ID NO: 19365 - DNA, 201 bp, Homo sapiens
gcatcttcctctattcctcagagagataaaaatatacaatgtgactaatataatggttattttttacacagctgattttttatgttgctaattttatgctsctaattttatgctaatttttttgcagtagttgttgttataaataaataatctcatgtatgttttcagtgaaaagaatatttctattcaaaaacatgctct

SEQ ID NO: 19366 - DNA, 201 bp, Homo sapiens
ggcacctatacttttggcatcttcctctattcctcagagagataaaaatatacaatgtgactaatataatggttattttttacacagctgattttttatgytgctaattttatgctcctaattttatgctaatttttttgcagtagttgttgttataaataaataatctcatgtatgttttcagtgaaaagaatatttcta

SEQ ID NO: 19367 - DNA, 201 bp, Homo sapiens
gggctttggagcagaaggcctcaggatgccaaaactccaagacacatacttagggtgacacactctccacccttaatacacaccacagagcaccaaccacmtgcttacgtctttgagagtgaatgagttatcaaacttcatatggaatgctctccactcagggaatcttttcctcactggacactagtcctccaaaacaaa

SEQ ID NO: 19368 - DNA, 201 bp, Homo sapiens
catatctaagtaaagaaaagcatttctaattctttttgctgtgatatataaatcatgtatgtgtgtgtgtgtgttcgtgtgtgtgtgtgttcgtgtgtgtrtatgtacacgaactatgctataccttcctcgaggaccaatgttgtgctaaatgtactaaagagagaataaaagacttggaaatgacataggtttaaagtc

SEQ ID NO: 19369 - DNA, 201 bp, Homo sapiens
tcttgcagcaccattaaatagatcccacaaattctttgcattcaaaacgtccccaaaattctttcagttacaatctatgactttgtctgccctgtgtaatrttaaactgaactgtagtatgaaggccatttaaactcggaggccccagctactgttaagaaagaagtgaacgaaagttctccccaagagtctaatttgcaa

SEQ ID NO: 19370 - DNA, 201 bp, Homo sapiens
aataaaaatatgattcagggaaaatattgaaacataaaatgaaaaatatgctataaaattttctgttacaaactggccatatcttgtagaaaaaaaaatcrcatacaaatagtatttattacacctctgacactacactgagccctttacaagtattatttgcatacaagcagaggcaaagtgtcataatacacacctcat

SEQ ID NO: 19371 - DNA, 201 bp, Homo sapiens
aaaaaccaactgtgcatgcttccctagagtcccacataagcccacatgaagagcaactagaaaaagacaaaagcaatggccctttcttggcagcaagtcaratctctccgttttaactagctgcttggaaagataaggtcatgacatgtctagaaaaactgcacacttacttgaacagataatatacaaaaagctggccct

SEQ ID NO: 19372 - DNA, 201 bp, Homo sapiens
agcaaaaaaaaagaaagaaaaagagaaaggaaaaaagaaagaaagagaaagaaagaaagaaaaagaaagaaaggaaaaagagaggagggagggaggaaggragggacggagggagggagggagggaaaggaaaaaaaaagagtcaaagaaagaaagagaaaaagaaaaaaatctaactagcttcattgtagtagcttacag

SEQ ID NO: 19373 - DNA, 201 bp, Homo sapiens
taacttgcaagtaatctcctattcagtgtgcatggctaaatgtgtgagaatgaatggccaaaaagatctaataaaaccccacagcattttaaagctacatrtgcataatgccaatttattttaattattaaatgcttacgttataatatcaataaataatttacactgtaattaactctattataaacagttcatgaatag

SEQ ID NO: 19374 - DNA, 201 bp, Homo sapiens
aaaatatatatcatacattttcaaaaagaaaatcttgcatcctcttattaaacttttttaactttgcatctggagtctagaattaattttaactatattgraaaaaaatatcagagagtggtgaaagagtggttagtttaaccacttaaactaacttgcaagtaatctcctattcagtgtgcatggctaaatgtgtgagaa

SEQ ID NO: 19375 - DNA, 201 bp, Homo sapiens
aaaaaatatatatcatacattttcaaaaagaaaatcttgcatcctcttattaaacttttttaactttgcatctggagtctagaattaattttaactatatkggaaaaaaatatcagagagtggtgaaagagtggttagtttaaccacttaaactaacttgcaagtaatctcctattcagtgtgcatggctaaatgtgtgag

SEQ ID NO: 19376 - DNA, 201 bp, Homo sapiens
gaggatgcccttgacatttcttggatgaaaagaaatcatatatacaatcaaaccaaacattgtttaggtcagtgataaaactttttttaaaaaaatgtttkgcttaagcacaaatatgtactctcactgactaagccattcggtatcaaaataacaccattttactcactattttgactccccaaattgcagaaatcttct

SEQ ID NO: 19377 - DNA, 201 bp, Homo sapiens
gaagtttatcagctctatttagtgagtcaatataatgagcacatctgaatgatcctaaatcaattttccttatcaggatatgtgtttgcccgaagttttgwctctctactttgtcttttcttttggaatcatatccctgttaagaatttatatatgatgagaaataaagctaaaggatatgatcctacataagacaaagct

SEQ ID NO: 19378 - DNA, 201 bp, Homo sapiens
tggaatttcacgcattgtgacaatttattgcaacttttgttctattgtcaaagtttattatccagtcagaattaacaccagtgcacaaggaaagcagatayaatgaagcaacagctccaagttgacaaagcagctagacttggagctgaaactccaagcaaagttttattctcccttccaggattgttgttagaatagcat

SEQ ID NO: 19379 - DNA, 201 bp, Homo sapiens
gaatatgacagtatgctggcttggagaatttcaaagacagaaggggcttaaaaacaccatataagctaatttcaaaacatcacagaattcaattacaaacmacattatcagaaaattaaaatttctgtctttgcattatgaataaagaatatttatgtctaacaggaaaaaattattgcaatataagttcttgcatttcac

SEQ ID NO: 19380 - DNA, 201 bp, Homo sapiens
acctcagcagatagggcggcctcaacatagacactgacagtaatttcttagctgctcctgccctttcagactgaaagtccttggaatcttcagggaagcayactgaaagaaaatgtacccaaacaaaaatctgcaagtggccaagattttgccttgcacatgcaccatccataaagggaccttccaggtatcctccccaac

SEQ ID NO: 19381 - DNA, 201 bp, Homo sapiens
tgtatttaaagactgtgttcacagcctaacctcttgagtgatctattctagagaatgtgttttctggtagcaagaacatgtggggctgctcctgtgacctyagcagatagggcggcctcaacatagacactgacagtaatttcttagctgctcctgccctttcagactgaaagtccttggaatcttcagggaagcacactg

SEQ ID NO: 19382 - DNA, 201 bp, Homo sapiens
ctaataaataaaccagagaaaaatacaaaatgagattggagagatggaaaaggtctggaaaatgcatggtcttgagtacataaagagaaattggattttcyccctcagttcaatgaaaagaaactaaagatttgtatgtgaatcagtggcatcatctgacttaatgcttaatgttttctctctctatcttctgggtgaaaa

SEQ ID NO: 19383 - DNA, 201 bp, Homo sapiens
atatttagatagatagatacatgcatacatacatacatacatacatacatatatagatattgcctatgaacacttttctaaataacacctggggtgcacastcaggaacatagattacgtcagctccttgacttggctgcaatgttactcaaagcagaaaaatagactttttgaaagaacttttctttttcccacttaggt

SEQ ID NO: 19384 - DNA, 201 bp, Homo sapiens
aaatagtctcatcactcacaatctactcatgagattggtccattgcccagaagtgcacaaatgatatttctgatgaactcccattagccttagaggagttrccggtacacatatgatcctcatcaagagatgaatatagacttctatatatttgaacatggtaataggtcctttcttgcaaaactgtgacctactgctctt

SEQ ID NO: 19385 - DNA, 201 bp, Homo sapiens
tgaaggctttcgtgattaccaaaattccattggctagttccctgtttgcacctttgcatccctttattcgtggtctcaccatgaaagctaccacctgctaragaaacagactgggtgcaatctacaaaggaaatgtttctggtttctggtttaatgctaaagttatgtccagattatctagttctaggccctggaacacta

SEQ ID NO: 19386 - DNA, 201 bp, Homo sapiens
ctttcagtcattcattgaacacactaaatgagccccagtggagtcaatattgaaactgcacaataaccgtgtacactttggatctgtcctctttctaggayggtccatggtcccatgtcactgtgatgacctacttcagagtgctgctggcatcttagaggacaggttttagtaactagcaaagtcatggaccaataggaa

SEQ ID NO: 19387 - DNA, 201 bp, Homo sapiens
atggccccaggcctttatgcttcttaaattcttaagagtaggtattttaaaaacagttcgtccagatcctacatacctgtcaggctgtcacgtttttgtgktcagctagcggcctgacatggtagccagcagccctctttataatttgctgctgctaaatgcagtggtctaggaaatcttatcactaacccagctaggctg

SEQ ID NO: 19388 - DNA, 201 bp, Homo sapiens
cctagtgcctgacatatgagaagtattcagtatgtgcttgttgatattaagagataaactgtctggatagctattttcgcttatagtttagaaataaatawttcacagcatttgaacaattttagataaaaatatttctaaagtgaattgtgtaatcaacgctttactaaaaagcttatagcttcctttttcttgataaat

SEQ ID NO: 19389 - DNA, 201 bp, Homo sapiens
acacaactcatcataggagactcagtctatggctctttccactacattacaaataaaggaccctattatttttccatagttgagaagttttgactgttctratgacatggaaggtcactaagatttaccttcttggaatagagactattgctaaatgccaacccaacttatttgctgtgtgaaatcaagtaaatgcatttc

SEQ ID NO: 19390 - DNA, 201 bp, Homo sapiens
cttcaagattaaatatgaaatactatatacttacaactgcatggcacatagtaggtactcagcttgtaaaatgaatgaacaaataaatgaatgaatttatrccttgcctatgagttgtttctacaatgctagttttcaaccttagctcggaagatagtacagtactacaaattttgtggaaatgttttcaggaataggctt

SEQ ID NO: 19391 - DNA, 201 bp, Homo sapiens
tggtttccgtctccctcaactgcttacattgatgtgttctagtcaaaaagagaaagagagagtgtacattctccattataccaacaaccccaatggcaaaygatagatacaaagcactgttttttactccctgttgcataaaggctttattttttatatttttatgagtaatctaatttttacttttatttaggaccataa

SEQ ID NO: 19392 - DNA, 201 bp, Homo sapiens
ctatgtaaattatgctttgatttctttttctttatttttttaaatggcattgtgcatcagagagtatttttcactaacttcttcagctctctacaatatcyttcaaaatggtacctgaggcacggtatcatcccctggagggaaacagcttaacaagtgtgctttgctggttaattataatgcttcaaggtctgtcttaaa

SEQ ID NO: 19393 - DNA, 201 bp, Homo sapiens
gtgtgcgcctagcagagcttctgggtcagcctcccaatcccaatattatctatcacctcctctagcatgaaggttaataacttctggctgaagatgtctayattgctccttcactgtttatagccatgaactcttccagggggacagatggcatccttcctccttgaagagtccacgtttcacctctgggaggcatgctgc

SEQ ID NO: 19394 - DNA, 201 bp, Homo sapiens
ctcaggcagattctcaagcacttttggttccctagcaaatctctggtaccttaagaatcctcttggaagacccaggaattctggaatgagtagtagcttgyagaggcacaaaagacagcaagaatctcaatttctatcaacagctttcaaatttggatggctttcccttttcttttgctatctggttactcacctttcatt

SEQ ID NO: 19395 - DNA, 201 bp, Homo sapiens
tcacttaacattttggcttctctctgaggacacaaaagcaaggattaccttcaatacaaactgagggtatgaagagaactacaccaacactatgcctatamattgttgtctacctaattttaatgcagataagtgctggcttattgatttgcacaattttccagcaaaatggaaatcccacgtgaatatgttctttgtgtg

SEQ ID NO: 19396 - DNA, 201 bp, Homo sapiens
aattgtgtcaaattctgctgtaagggtatgatgtgcaaagaacaatgtatgacaaccgtagagactacaaacaatggcactggagccacggacttcatagwtcacaactgcgcctgtacatattttattgtaggcattatatatttaaagcatgacaaatgtaccattgtacattatgtgctgcacaaatagaagctcctc

SEQ ID NO: 19397 - DNA, 201 bp, Homo sapiens
gcacggcagacttccctagctactgtaagactataccattaccaaaattgtgaatatatatttcttcattttcccacaacttaaaatggatcgttaagtayttataaaggggaaaaataataaaaaatttagttgaatatttgtcaactaaagcagtgatttatttcattctatctgagaacagctttttgaaacagagat

SEQ ID NO: 19398 - DNA, 201 bp, Homo sapiens
cattatcccatgttacaaatgaggaaaccagggctgacagagactgactatacttgccactgtatcttgttgtttggtgccctttatatcttatatttagrgtggaacattaagccactcataaccaaccaaggctagttgaagaacaacgctactattgggggaaaacctatttgaaaaatacaatcgatcttttcctgc

SEQ ID NO: 19399 - DNA, 201 bp, Homo sapiens
tttcaataggattttaaacaatggttttcaaacactcaggtagaagagcatttctgctggctactgatacctttatgaactcctgagttaaaccacttctrtggatcacagagtgctttatagtttcccaaaagaaagtgaatctgtttgaaatatgagtatttagaaagttcgcctctcttttggaatgtagtcaaagaa

SEQ ID NO: 19400 - DNA, 201 bp, Homo sapiens
aatctgataaatgagctattttcctttagcaatctgaatttggataagaaagcttacaggatctagaatccactattattgtcagtcccataagcctgtamcccttggacactgagaaatgctattaacagcacttgccatttgagtgacattcaggtaccatgtactgcacagagtgattctatcatttaacttcttaaa

SEQ ID NO: 19401 - DNA, 201 bp, Homo sapiens
tggtgggccatgagtacaaacatctcatttttttaaaacaactaaaaaaggaggcagggcacagggatgagattgatcacttttctggactacacgtgcaygtacttcacagcattgtgctatagactctccaaggatttctttcaatctgataaatgagctattttcctttagcaatctgaatttggataagaaagctta

SEQ ID NO: 19402 - DNA, 201 bp, Homo sapiens
ataccctaaaatgattatagtcatctgttggtcacaaagcttgagcttgaaaaaggaaataagtgaaacagtgcttgaactccccaaagttctcacttcarttaagttatgggaaaatcagagaagagaattccaagttgggcacatggaagaaaagagtttatagttttcactacaatcaagagcatacttaagctcaat

SEQ ID NO: 19403 - DNA, 201 bp, Homo sapiens
acaactgcatggcacatagtaggtactcagcttgtaaaatgaatgaacaaataaatgaatgaatttataccttgcctatgagttgtttctacaatgctagytttcaaccttagctcggaagatagtacagtactacaaattttgtggaaatgttttcaggaataggcttcaaaaccactatagaaagtatttgtttcataa

SEQ ID NO: 19404 - DNA, 201 bp, Homo sapiens
ctttcttctctcccttctccttctttcctttctactttttttcctttattccttcatctctcctttctttattctttttttttcttttcttccccctcttyctcctttctttcttgatgagtacaagcctcccgggagcacagctctcatcttccattgtatgccctccttggcccttcagtctcctctctttccttcttt

SEQ ID NO: 19405 - DNA, 201 bp, Homo sapiens
tttccatcagaaaacccactggcaaatcttcctgtcaggctataaagataacctcagagatggccaccagtaagctaatttcttagcagaatttggcacaytacaaatcagcagttacccttgatttaaagctataaaccacttttttcgatagggagcctgaaggcagggagctgtgggaccaggaagatttcaatagat

SEQ ID NO: 19406 - DNA, 201 bp, Homo sapiens
acttcagacatggggaattggaagtctgaattattatttttgaaacagaatagtgttattgatagtggtgcaaaccatggtattatggacatacttcatayactatgaaaaaatggtgttatataagaacataaaaaatattgtactatagacatctcattccaccacctatgaactgctagcagaaggttataccaacat

SEQ ID NO: 19407 - DNA, 201 bp, Homo sapiens
ctccccaagtctctgttttgggtgtttgaacaggtggtgttaacacttctgattataagccataaagaaaaaagagaagatagtgggtgaggaagcaggtrggaggtgatgagttgtggtttgatgaactaatatgttgaatttgagctgctatcagcaacaggggcccagtggaggtagaaatcaaaccttaaattcaca

SEQ ID NO: 19408 - DNA, 201 bp, Homo sapiens
cacaagggaactgttgggagcattaaagtagtaatttcaaaatattaccaacctcaagagtatttctatggttctataatagagagtcaattactatttcmagtcattttcttaaaaccttaaaatttggtaatcgcacatttagcttataaagtgctacatctttctctgatgagaaggagacagatgttggactaggcg

SEQ ID NO: 19409 - DNA, 201 bp, Homo sapiens
ctggttcaagacacaagagagtcgcgaggtgttgctagtgctgagctacgcaacaggactcttgtgttccagcgcaagaggcactgtgcatcactctgcgratgggaagcaggatcccagcgccactgaatgtgggttagagtggagtgaactaccatgaggcatggttaattctggaaaatagatgaacttttcaagccc

SEQ ID NO: 19410 - DNA, 201 bp, Homo sapiens
gtgatgagatcaggggctgaattgtcagagaaggcttatgtgaaggccatgcctgggtgatacaggggacctggtacacatgtccacttattccagcaggktccttttctgacttgggcttatttccctccctcaagactcagtgaggcctggagtttacagatcattcattctccaactctcttgggaacaaagatcact

SEQ ID NO: 19411 - DNA, 201 bp, Homo sapiens
atgaatttgctaattcttcatcattggtttctatgacatgagagctttattttgatttttaaaaaataaagatacatttaacttaacaatagttttataakttagacaatttgcagttttgggggatgttatacaatagaatatgattcaatattttccctattccctcctcaccaagtaacgagtgagttcttgcttgct

SEQ ID NO: 19412 - DNA, 201 bp, Homo sapiens
agacaagaaaatgcaaaaaagtggtgggaaatttgggaaaaactttcactctatgtatgctgcaccccaatatgtctatgataaattccagaaggcaatayagatatctaccttggatacctttttatcagaaagaggttcccattgaatatatctagccagacattacagatattagctactttaatacttacaacatga

SEQ ID NO: 19413 - DNA, 201 bp, Homo sapiens
tccctactttccagaagcagccccagatggcacatggagatgcacctcgtgcacagccacagcccccaaccctcggcctgcctgcacctctcaccattcaygccacagcttctatggcaagttagaggagaacttatgggtttaacccaaatcctacacttagtaatcctgttttataaacctcagaaaatttgagttttt

SEQ ID NO: 19414 - DNA, 201 bp, Homo sapiens
gtattatagtcatttctttttggcttacttggcctgtgttttttggaatagtttcacatttttcattttatctttttcacacaatcattagagaacaatgygagagaatgtggggtggagtttgactcctcctcttcctcactgcagcgctccctactttccagaagcagccccagatggcacatggagatgcacctcgtg

SEQ ID NO: 19415 - DNA, 201 bp, Homo sapiens
ccacattacaaaggaggcgctttcacatttattattttattctacctccacagcctatggggattcgagaaccatttccacctgtggttgagctctgggartctctggaaaatgacattcactggtgttctattgacccaacatgacaagctctaccctgtattcctgaatggctcagagataatagctatactccagtaa

SEQ ID NO: 19416 - DNA, 201 bp, Homo sapiens
ctcacaaataccaaacaaagtgtttcctaagacctaagttgactttacatagaagaaagttacaaaagctttcaaaacttcaccctcaagatacaactgarcattggactggactttaaaactgtttaaggtgaaacgtgaaagctaaaaagaagattgaagtgtaaatgcatgaagaggcgaattcaaagtatgtttgct

SEQ ID NO: 19417 - DNA, 201 bp, Homo sapiens
agttaattgaattatgaagaatacacacaatggaacactaggcaatgattaaaaaaacaataaagcagctctcatgagaaagagctccaggagagaaaagraaggagcggagtagtgtgtcatcttttgtaaaagaaaaagtcagggttaggggaggatggaataagaatctgtaagctctggagggagagagaagaaacc

SEQ ID NO: 19418 - DNA, 201 bp, Homo sapiens
aattttttcaatatgatgcccagcctcctgaaaaaaatgttaattggcagaatggccatttataatagaattataatcttactaactgcacatttataaaytgatatttgcaactctgttgtcccctaatttcctggtgatagaagaattcaaatactgatgtcaaattgagtagcttttaaaagaatgttaagtatgtgt

SEQ ID NO: 19419 - DNA, 201 bp, Homo sapiens
tgagctgtggagtgctttccccagggcaataaggagaccctgctggctttagctgtgacaagtgcttcctctcggtcccttttatacacactatcaaacasacaccgttcatagcaccttaagaaaaacttctgagccttgctcttggctgtccatgcaggcctgcatgattaattagggcaggaaggcaaagcggtttca

SEQ ID NO: 19420 - DNA, 201 bp, Homo sapiens
ataatgttaccttattctgtttcattagaaaagaaaatcccacaaagtatcagatgtttagcaatgacctgtctgcaaatgttattgtgacgtgaaaatastgtgaaggcaaattaagtaacctagtcataggttcttgtttttgtttttatgatagtaaaatcattttacaccattttccctgtagtcattttaccaatc

SEQ ID NO: 19421 - DNA, 201 bp, Homo sapiens
gatgatttggaaccaggtactaaatggctgactaaattttatcattttctcctgaactagtttattaggctcagccttaacgaatagaatacttttttttwaaaataaataagggtcatacattagtttaattgctgtgatctaatacatactttaaaagtatcatacacattatactatataaagtgaacagttacaata

SEQ ID NO: 19422 - DNA, 201 bp, Homo sapiens
tgacaaggtataaactttcaaaataattcactgaatgggtggatggaaaatactttaatattaatatgtgataccttataatcagtatgaaagatataccyaagcaccgaaaagagataagcaaaagctaagtgatttctttgtctttgtctttattgagaaacctattaaaaagaatatcattctgaaattgtctactga

SEQ ID NO: 19423 - DNA, 201 bp, Homo sapiens
gttagacaaaatgaatgcaaaatgctatcttaatattctcctcttgctatattaaaaataaaaagccttagtgttatagaattagcgggaagaaatctgcwgcctgatatttactgccttgaggaactatctgattttcatcataagaacattattcttttccatcagaaacatgagaacagggatttattttttaatatt

SEQ ID NO: 19424 - DNA, 201 bp, Homo sapiens
aagaaaggcctcaactatgaatgaatgataatgatatataaaaattccacatgcaggtgaagtaggggaaatcctttaaaaaaagatgtttaaaaattatmaaaaaaaaatctctcaaaaacatttcaaagcctctaatgatagataaagaaagtcctctgcttgcagagagcaaagatgtcccagcacggcatttggcaa

SEQ ID NO: 19425 - DNA, 201 bp, Homo sapiens
tttaagaaagggatatggagaagtagaaagttggctcaggttgaagaatgtactgtgactaatccacaaaaccaatcatccacaggtggacaatattttaraaatggcccaggggatgctgctctggtcttttggagctgaacgaatatttccatatcgtatagctttgtttgtaatttacttttttttccaacaaagaag

SEQ ID NO: 19426 - DNA, 201 bp, Homo sapiens
ttttaagcggtgtttttattttcaaacaaaatgatgtgatttataaacatttttgggtcctgcttacctcctaatgctgctgtaatgagtctagaacttaragttggcatgtcctcagtaaaggccaatggcatgggggcctggaggcaatttaagaaagggatatggagaagtagaaagttggctcaggttgaagaatgt

SEQ ID NO: 19427 - DNA, 201 bp, Homo sapiens
gaagaattccataacgggaattgtatctttaataacatgaaaccaatcagtcaactcttgggtatttataacaggaagaactagtgtttaagatattctaratcactaaatatttttaagcggtgtttttattttcaaacaaaatgatgtgatttataaacatttttgggtcctgcttacctcctaatgctgctgtaatga

SEQ ID NO: 19428 - DNA, 201 bp, Homo sapiens
ggcacagagcacaagcccaggaagattggtcaaatgaatatacaaatggggggtggggaaaaaatagagcttggttggcacatggtggttcctgggagttrcaattatggaatatatcatgtagcattttctgtttgcccctttaaatcttttagaatagggaaataatttataacatagtaaaaaaattataatgtagaa

SEQ ID NO: 19429 - DNA, 201 bp, Homo sapiens
ccagtgtccgacatagaacaagtgtcctgcagccctgctctggatgcagagtatggcctaggggcgaagagggaagaaggagcagactgtgactatgacayggccacaaattagtgaaaggatctattggcctagaaatgcaaagtcatatttggggaaatgaatgccttgcctagaaaataggtactaaaatatatagct

SEQ ID NO: 19430 - DNA, 201 bp, Homo sapiens
tattctagatacctcctataagtggaatcatgcagtacatgtctttctgtgactgacttatttaatttagcataatgtcctcaagtgaaccatgtaatttrtatagatttgcttattttatcctcatggaaaccctaagatgtaggtcctattatcttctctgtttaacatttgagtaaatggagacttagaacatacaag

SEQ ID NO: 19431 - DNA, 201 bp, Homo sapiens
tcctgactacagttctaaaagaggagtttcaaaaattttttgaactctgggagcaataataaaatgagtttgcagcctcccaaggtgactactttgaatgyaacactcattttgggaatataaattctggtctatgtggtaaaatgaaactagttccattgctctatagttatacattgttttcagcataataatttagat

SEQ ID NO: 19432 - DNA, 201 bp, Homo sapiens; identical to SEQ ID NO: 514

SEQ ID NO: 19433 - DNA, 201 bp, Homo sapiens; identical to SEQ ID NO: 514

SEQ ID NO: 19434 - DNA, 201 bp, Homo sapiens
cgcaaggggtcagggagttccctttccgagtcaaagaaaggggtgatggacgcacctggaaaattgggtcactcccacccgaatattgcgcttttcagacyggcttaaaaaacggcgcaccacgagactatatcccacacctggctcagagggtcctacgcccacggaatctcgctgattgctagcacagcagtctgagat

SEQ ID NO: 19435 - DNA, 201 bp, Homo sapiens
ccacctctgggggcagggcacagacaaacaaaaagacagcagtaacctctgcagacttaagtgtccctgtctgacagctttgaagagagcagtggttctcycagcacgcagctggagatctgagaacgggcagactgcctcctcaagtgggtccctgacccctgacccccgagcagcctaactgggaggcaccccccagca

SEQ ID NO: 19436 - DNA, 201 bp, Homo sapiens
cgcctcctgggttcaagtgattttcctgcctcagcctcctgagtagctgggattatagggatgcaccaccatgcctggctgatttttgtatttttagtagrcacagggtttcaccatgttggtcaggctggtctcaaactcctgacctcgtgatccacctgccttagcctcctaaagtgctaggattacaggcgtgagcca

SEQ ID NO: 19437 - DNA, 201 bp, Homo sapiens
gcttccatttaaaaattcttattgttgatgtgcaaaatagttaacaattcaaggaaaaggtcaaatgggttaatcgagcctgtgtaaacagtgactacttycacatcagaataacatgtactgcaattcatatgcctcaaaaattattccgtatatgccagaaagattatgtgttaagtctgtgtgtttaagtaatctgga

SEQ ID NO: 19438 - DNA, 201 bp, Homo sapiens
aacatattagcatacagagtgatttgttctaaaccagaggcagtctaaatgatgcacatgattcaaagaactcaaaattatattactgttacttaaccagmttctccctgatcttaagctactccctggttcaagacacaagagagtcgcgaggtgttgctagtgctgagctacgcaacaggactcttgtgttccagcgca

SEQ ID NO: 19439 - DNA, 201 bp, Homo sapiens
gcccagggtggattctggctttctgaaagatggggatttcctaggcaacagctcactatactagagcctcaggttagtgagagggcattctcagagtttcrggaaagaacatttgtggccatggcggccattaacccccactctgcccgatcacttccaccataaaatttatttgggatttctcatctgactaggcttgct

SEQ ID NO: 19440 - DNA, 201 bp, Homo sapiens
ttgtttacggaaaataagtttgtctgtgtagatatgacctgttcctcaagctgtaaatatcttccaaaatatttccctagtgtctagttcgatgctgggcraaggacaggagaaaactcttgagaggagccttgtcttggcttcctttattcagcctcatcacaaggctgctgtaagcatcttgagatcagagagtgtttc

SEQ ID NO: 19441 - DNA, 201 bp, Homo sapiens
ggagaaaactcttgagaggagccttgtcttggcttcctttattcagcctcatcacaaggctgctgtaagcatcttgagatcagagagtgtttcaaatactyactgggtattctcagggcctagcccataatagtggctcaataaatcatgtttttcataagtaaagtttattgcagactgtttgatgctactgttggaaag

SEQ ID NO: 19442 - DNA, 201 bp, Homo sapiens
cctccatatcaaagcacacaaagaccagtccccctcaacctactttgaaagagtagtaacttttaatcactagaataactattggcaaactcaaagtaaayagagttccaaagataatgattcagacaacacttgaaacataatttttaacatagagggagggagaatttggggaagttatatatattttccctttatttt

SEQ ID NO: 19443 - DNA, 201 bp, Homo sapiens
ccgttcctcttcccatggagtgaggaaggatctgaaggcttggaaaagccacagagtattagattgaccttcctcatgctcttctctgctctcggcaggasccaaacccttcctgaagtgatgagaaattacagctttccgctctgtcctttggttagatacactgccctttatgcctcactggtcttgggggaatggcag

SEQ ID NO: 19444 - DNA, 201 bp, Homo sapiens
accttctaactttcggccttccagccaattttatgaccttttccaacttccccctttaaatgacagagcctaaaattgaacaaggtattttggagtctgaycagcactgtgtttgcagcatcctatgtcctatagatgtatcctgcaattctgatatgcttgtacagcaggagtgaccagagccgggcagttttgtccctg

SEQ ID NO: 19445 - DNA, 201 bp, Homo sapiens
tcgatgaatcactatctggactgaaaaaatttagcgaagctactagaaagttaaccatgtatatcaggattgcacagcgctgcttttggtagcatgtttayagtttaattttccaaaaacaaaattctcacaatggtaaaaagaagaaaaggtggctgacataaaacccatcttcctattcagataacttaaaagaatggc

SEQ ID NO: 19446 - DNA, 201 bp, Homo sapiens
tagtgattacaatattcacaaaaattcattaaaccctgtttgttttatcttcatcatttaagaaaggctttgggagttaataagtatactcttgtactcaktttaaagctttacagggtattactagccaaaatgatctcctaactaccagactcaaaacactgataggctggtattaaccaattattaattgactattga

SEQ ID NO: 19447 - DNA, 201 bp, Homo sapiens
tgtgagacattactacttggacatcattcttgctagaaatgtgaacaaagttttctttctcaaatctattttttttctgtctgaccaatatctgttgatgwcaccttcatcttccttgtcacctctactcaaaatgttgcagtcatttttgactctttccttttctaccaaactcttgtgagttctgttgggtctaccctg

SEQ ID NO: 19448 - DNA, 201 bp, Homo sapiens
tttgctgtctaaagttattaaaaagaggggaaaaaccccatactttgctcagtgatttgtggtttgcccagtacttttacttattgatccttgtaacttcyctttgagggagccatgtaggaatagctgctttgcaaaagcccacagagaggttaaatgatctcagatctttctatcaacaaagactgaagtaaaaatgaa

SEQ ID NO: 19449 - DNA, 201 bp, Homo sapiens
tattaaaaagaggggaaaaaccccatactttgctcagtgatttgtggtttgcccagtacttttacttattgatccttgtaacttccctttgagggagccakgtaggaatagctgctttgcaaaagcccacagagaggttaaatgatctcagatctttctatcaacaaagactgaagtaaaaatgaaatatactttttttac

SEQ ID NO: 19450 - DNA, 201 bp, Homo sapiens
aggtctggtacaattagaattgatgatgccagcttcacataaatagttgttataaatccttaatcttttgggaacttcatttgctaaattctagggctcawatgtctcaaaggtaatttctcatgtgtgtgttcctcattttgtttattttcaagcctaatgaacttcatattttcttggcaaaatgtcctgcatgtcatt

SEQ ID NO: 19451 - DNA, 201 bp, Homo sapiens
ctaatgaacttcatattttcttggcaaaatgtcctgcatgtcattggcattttagtgttgcgtggctcttaatatttatctcaccatttgcaaaactctgyccatttgaaaatgggtgctaggtttcacttttttggaagacagatctgtttcctaaaaatttacattgctattgatgaccattgtcaattaaaataatga

SEQ ID NO: 19452 - DNA, 201 bp, Homo sapiens
tagggttcagctttctttacagtacgctacaatagaatacctgtagtttagttagggtaattagtcattataaaacaatttatcacaagaaagtaagaacsctggagcacaatttattagatatttgccaaatgaacagccatagtactctctagaaccaccatcttcagagaagattaaaactgcctcagaaaccagtgc

SEQ ID NO: 19453 - DNA, 201 bp, Homo sapiens
aaaacatgactgtgaggattaactaagataaggactacgaatgcattttgtcacaaatgaattcatttttgtggttgctgctcacgctgatggttctcttyggttattatccttgagttgctttccctgaccagttctggtccctggtgagccactgacacaattatgaccaaacattctggcagccaaaagcttgtatct

SEQ ID NO: 19454 - DNA, 201 bp, Homo sapiens
ctgaccagttctggtccctggtgagccactgacacaattatgaccaaacattctggcagccaaaagcttgtatctatggggaccttccctgggataagcarggcagcttacagtcacagagcacagggtttcactgagagaaagtcaacagcacagataaaggttgaacttataacctgggttttaatagctccctgatca

SEQ ID NO: 19455 - DNA, 201 bp, Homo sapiens
aactacctctgtgtattcatagcagcatgagctagcaagaatgcttcttcacaccatatttaaacttgggaatttaagttgctttctcatatttttccacrgaatgttaatgggatgcttgcaaaaatagagatgtcaagtgggatattgacttcctaacatcagttcagaacattgatatttgagttcatttagaggcac

SEQ ID NO: 19456 - DNA, 201 bp, Homo sapiens
ctttggtaattgtgattttaagttctcttattaaaaatatctaatactgacaggtcccacctaatatactaagcacggtactaagaagtttccatgaattrccctatttaggactcacagcaaccaggtgaaactgttacagtcgccactgccatggtactcacgagggacccaaaggaacagagagggcattctccagtt

SEQ ID NO: 19457 - DNA, 201 bp, Homo sapiens
atgtctaagatagtgtgaaagaaaattgaacaaaaataaaacaatcatgtggcctttcatccaatgataaggatgagtttaaaacctcaaaaattcaacayacaatcaaattatactttaaaaaatgtggctaaaagctatctgacagtttgatttctgtttgggaattagcaatgtgattcttaagtgtattgtcctgta

SEQ ID NO: 19458 - DNA, 201 bp, Homo sapiens
tcagaagttctgaggaggggcctgagactctgcatttctaacattccaaggtggtgtcaatgtggctagtgtgtgaacccaagtttgagcagcagggcacraatttgcacaaactaattggctctcctgaccagaatctaaattctgagggctggcttttttgcttgacttgtttactgctctgttgtcagtgcccaattc

SEQ ID NO: 19459 - DNA, 201 bp, Homo sapiens
aacttatttttaaaaattgccccagttttactcccaatagtcaagctgtatgctaaccaagagtcaggtatattagttccccaaataatgttcttgctcaytgtacttgttaatgcaattataacgtttattcaaatagtgtataaactgattaaacctgcatgcatacaaacagaatggtttctttataaattaagccta

SEQ ID NO: 19460 - DNA, 201 bp, Homo sapiens
ggaagattcctgcatttcccttgttctaggagtcagcaaggacatagaagacctctgagtacagccgacagttcacggagtctttccttggtatgtttggwcataagtacaagacctctctggtggtgacatttgtcactgcttctgcttcacatgtgggaggccaactaaggagatttttattacagcttacttttattt

SEQ ID NO: 19461 - DNA, 201 bp, Homo sapiens
tagcatacttttttaaaattccaaacaaaattttttgcaggccaaagaaactttagaattttaggtctatcatctttcttctcaatcatctttaaaactartgaggcttactcattgttctttttaaatctgctttgaaataattcctcaatctttaggtgaatgttgagataaacaatgccatttgaaaatagagaaata

SEQ ID NO: 19462 - DNA, 201 bp, Homo sapiens
tattaaagaataggaaatgcaggcattctctctctttctgctagaataagaccctgaaagctaaacatgctaaagcaaaatgtgagagatagagctctgcmtgggcctgagatgatgaagttgctcacagaaaaatggtgagctgagaaaggacttacgtatacctaagattgtctttgaagcttataaataatgtttctg

SEQ ID NO: 19463 - DNA, 201 bp, Homo sapiens
ttaggaaaggtgacatgcacaccaagccgcagtatcaggagtatactaagggtattgtcattatcatgaaatgtgattacacatcatctcaaactaccctrtaagatggatagggaaggcataatattcactttttctcagaggaggaaaccagtcctcaaaaaggtgcagtaacttgctgcatgtaattagcctttgcgg

SEQ ID NO: 19464 - DNA, 201 bp, Homo sapiens
aaacttatttacaaggaattgagcaaagtagtctcttatgagtccattaattctctatataattgtgtttattttatatagtctgtgctttgctcttcttyaaccaacctatttcattgtattttcaaagaactagattttaattttatttctcagttctactgtttttctgttttgcttgctattttctgctctttaagg

SEQ ID NO: 19465 - DNA, 201 bp, Homo sapiens
gatccaaatcaatgaattaaggagggattactcaatgcatgtcattgatttaataagtgaatcaagtaaaaaaaaatcaaattgtatccatacctcctccytaacagctggataattttaagagacagttcattcaagcaaaagaaaatatgaatggctcttaaatatataaaaaataatacctagatctttttcatctat

SEQ ID NO: 19466 - DNA, 201 bp, Homo sapiens
ccatacctcctccctaacagctggataattttaagagacagttcattcaagcaaaagaaaatatgaatggctcttaaatatataaaaaataatacctagawctttttcatctatcagattgggcaaaatccaagtttgataaggctaagagaaacaggcattcccatatctagagaataaaaatgtaaatttgtataacac

SEQ ID NO: 19467 - DNA, 201 bp, Homo sapiens
gtgggagggatacacgttacaagagcacactggcaggagataaactatgtccacttgagagcatcttcaactgaacctgaagggtcagtagaatgttagaragcagaagtcgggaaagtagaaaattccaagtcaaattaatttcagatgggcaggaaagcataagaagcgttcatacaatggcaaagtatttaatttatt

SEQ ID NO: 19468 - DNA, 201 bp, Homo sapiens
catattaaaataacaaagatgcaggcaacaatattataaaatgctacagaaccgtgtaattaccaagtcttagaagtaactagaagcagatgaatttgttrgtccaacaccatatgtttcaggtcaaataaaagtgtaagagcaaataaattgtctttatattactctactatattggtttattttgctccaattgccatt

SEQ ID NO: 19469 - DNA, 201 bp, Homo sapiens
ttatgtaaatcatgtcattaatttgttataagttcagtgcaattattatatttttggcagagttaatttagtagctctctaacaaaacacatcagcacctyttctcgcatgtggagttcctaatggctttagctgcctttggtgggttttctttccctcacaaataccaaacaaagtgtttcctaagacctaagttgactt

SEQ ID NO: 19470 - DNA, 201 bp, Homo sapiens
atgatgatcatcattttctccaattaccactcacaccctactctataaacatttttatttcattttaaagtgaaattcaatgtacctgtcctacaactttyctatctggatggcagaatttaataatttggatgtagaattcctggatactacaaaataaattaacgtgtcagaaaatcagaaacctgtgaagatagtgtt

SEQ ID NO: 19471 - DNA, 201 bp, Homo sapiens
ataattaactttagtaacgtaactgctaatgcattaaagatcaaagcaaaatttgttctacaaaacatccggtttagggaagcaactcatactgtttctcmgtttgaggaagttgtgatctggtagcagagcatcatgccaaaaagcttcaggaactataagcagtgggcccaagagcagggtttttggcacaggggatac

SEQ ID NO: 19472 - DNA, 201 bp, Homo sapiens
atttaaatcaggttttcagataggatattttgccctctgacaggcataaggaaatacactaaggtaactgaagacccaattcaattcattttactagccaygattaggttttatcctaaactaagcttagttcaaactctgcgcatgattctttgtctgggtttactatggcaatggttacatttttctctttctattttt

SEQ ID NO: 19473 - DNA, 201 bp, Homo sapiens
agaatcttctgataagagaatcttctgataaagaacccagtcaaaaagttaaggctgctagtactacagtaatttcggctgtgttcacaaatagaaaatgwtatgcagaataatgagttgcagatattcaaagattttcatgcatcaaacatcttgctattttaggtaaaaatgcatttttagtattcaggtaaacacctt

SEQ ID NO: 19474 - DNA, 201 bp, Homo sapiens
agtaatcctgttttataaacctcagaaaatttgagttttttaatttaaaaaggccaaaatgttaactgaatgtggataaaaagcattactttgcaaatcaygtcagttacagtataaaaattgcattgtttttatgaaaactcacatgagaataaagaaattacaatagtacattcaagagaattaagcattcatcgcgca

SEQ ID NO: 19475 - DNA, 201 bp, Homo sapiens
tgaaatgtaggatctctcgttttctctactcattctcttttattatttcagcaatgtaaaaataatatgagtttattctgattttttaaagaagagggcaraactgtgaatgctggctttacactgtcagcttgagtcatcacggtgccgagttcatcaggagagagactgagagacagagagaggacaaaaggctcaatt

SEQ ID NO: 19476 - DNA, 201 bp, Homo sapiens
ctgcatctgtccagtggggaaatggccactgatactttcagccatggcttcaccttggtgcagctaccttttaatactaaagacaatgggatcagagtccyagacacacaaacctaatcaacacatgaatgcgtagagagacagaaagaaagatacatacatatatacatacagatgcaagtagcatacttttattctatg

SEQ ID NO: 19477 - DNA, 201 bp, Homo sapiens
ggcagagagagaacaagaaaaatgtttttctccatggggagtggagttaatgctgagtgttaatgctgaatggggaaggaaggaaagagaaagcaattctygacacatgaagcaccagcatgattattcaaggtaggagagggaggacagaacattcgctggacctgaaatgaggagcgcagagctcagttctagaagaag

SEQ ID NO: 19478 - DNA, 201 bp, Homo sapiens
tcagttctagaagaagcactggaggaaggaccacccacaagaagccccaaccatacccctacacatgcctggacagatcctccaggtatataactgctatycagaacaggcctgttttcatttattgtttattccttctttccagtcctatgtcttctttatccaggttctgtgctgctttccccaaactgccccctcaac

SEQ ID NO: 19479 - DNA, 201 bp, Homo sapiens
ttctaattgtttcataactgtttatgttttcactgtccagaaggacagtagctaggtcttatcaatcatttgagccttttcaaacattgagaccatggtargcattcaaaatatatacactgaggaatggcattctagtcgtgtgggagctcaaaacaagaactgaagaggctctttgtttctcacaggaattagtagaca

SEQ ID NO: 19480 - DNA, 201 bp, Homo sapiens
atatatcccccaatgatttagataagtgataatatgaaatgtgttttttaatattggcaagttaattaatttattcattgtgaaaatgacagtactgttcratgacttatgaaaatgacaagagagttagttggactgttaagtgagtgaacaatgaaaaccaaaaagtgctaattaaaagccactgtaaacctgggagga

SEQ ID NO: 19481 - DNA, 201 bp, Homo sapiens
agaggtggcatctttcaagatgactttttctctgaaagctggtaagccggtttgactctatgacagcacattcagtgtcaaacaatatttagtactttggrtcataaatacgagtgactgcacaagtaattaattgattttaccttgacttaaatataaaatagaacattgctttagaaatgtgtatgatttataaataac

SEQ ID NO: 19482 - DNA, 201 bp, Homo sapiens
aactagcatagacaggtgacattattcaacacattactattcttaaattgaagtattatacttattttggagggcattctttagtgacaggtttattatgygctaccagaaaagaatacaacatgttataattgcaaaatttaacaggaaggatcatttagtttttaataattgttcacatgctaaagaagaaaatagttc

SEQ ID NO: 19483 - DNA, 201 bp, Homo sapiens
taacccatcagcagcctcattagtgtcaatgagtagaaactggcaatcagtagatggtgtgctctacatgtgtttatgttttaaaatgttcctaaaatagstcatccgctggcgaggttgatataaaacacttttcctggacaaatgaatttcagtttaaatattatggcctatttactttttttttaggaattcatattt

SEQ ID NO: 19484 - DNA, 201 bp, Homo sapiens
caatttaaaacctgaagcaaagtttgaaagaataaataggctgatttatttaaatctaaatgtaaatggcatcaacctaggatcagccttcttgaccaagygcttttagactctttattgtgtttttatttcaaagcaccaggggatgcaatcatataaaaagtcatttataatcttctacttcagttttttgaaattgtt

SEQ ID NO: 19485 - DNA, 201 bp, Homo sapiens
aaattacatcgtgactaagtataacaattatgtgacagaaatagacttttggtgattaaactctcctggggtaagacaggtgtggaatggtattttggtaygctcaggcaaacctgaccaatttgaaacacatgagggtcagtctagaactactccattttttaagagatatttgacatttattttttcagattgcagagt

SEQ ID NO: 19486 - DNA, 201 bp, Homo sapiens
atgatctcatgtaactttccctgctgatttatctaaatttttatgaagattatagaataattttcattgctttagtttaaggcttcacacataagatgtcyccttcacaaggcatatgcattcaatgtatttcagattttcagttccaaagtgtctttgcttatagcacttctatctcctctacaccgagatcattctcca

SEQ ID NO: 19487 - DNA, 201 bp, Homo sapiens
agaaaactgagtcctggagaattaagttttaaatatttccgacatcactcctgtctgcatctacctctctattttctcttgtcactctacattttatcctkgcttagtgattttcatatgaccagataatccccatctctatgcttacccatcatctcatctgcctaaaatacttctccagctcccacttccttctatttc

SEQ ID NO: 19488 - DNA, 201 bp, Homo sapiens
aggaggagttttctgaaaatgcaaagtgctgttgaactcttctcttaattcatacagaaaatattacccagtcataacaaactacacaatattactttcaytaaaattgcttcgggctaatttattgtcataaaagaaagatatcagacagtttgacatgaaaatataaggttatacttaaatatagtagtacgacatagg

SEQ ID NO: 19489 - DNA, 201 bp, Homo sapiens
tattttacaggatcccattatattctattttcgggcaatgaacctgcatttgtaacaatccatttgtattagtggttccaaaagctaatgtggtttctcaraataggtactttccaacttttatgtaggttataaacagtacttttaaaaaacagtgccttttcacactatcagatgactgaaaagaaaagggcttgtgaa

SEQ ID NO: 19490 - DNA, 201 bp, Homo sapiens
tatttttaaagaatcacttagatatggactaggtaatttgtacaatgtgctataattacccaactcttctagggcctttagcactattccaggtgtttagrtgtggtgttcaaaagaagaatcaaagagccttgattgtctcaggcttacaactctgttaactcaaaataaacatacactgtattacacaaactttggagt

SEQ ID NO: 19491 - DNA, 201 bp, Homo sapiens
ctaattatttgtttgcaagatgctgcatcttcattaaaatcattagtattctgagtagatggcactattaattttatgaatggaattgaaatttcactacyatgttccatacggttcttaggacaagtgagtatcccctcaagatgttatctgtgtaaaaagggtaattcttcataggtacacaaagtagttacatgtaat

SEQ ID NO: 19492 - DNA, 201 bp, Homo sapiens
tctgtagtttacattaattagggttccctgttggtattgttcattttatggattccaacaaatgtacaatgacatgtatccaccactgtagtgtcatacakaaaaggagctatgcttgtggtttttaattttttaaagtattttttgtggacacaattaatgctaagaggattcttttcagccaatgctgcctgtatctac

SEQ ID NO: 19493 - DNA, 201 bp, Homo sapiens
tggatgaaaattccatttgtgtttcaggctatgttgatacagaacaaaggagagtagacacttggcaattatcctgttaatttgatgaatgtggatggctktccggccttaccagatatttcaaaccaacaaatagaattctttttgtctcagtgatctaatttgttaaccagataactgccaagactgcaacttcattct

SEQ ID NO: 19494 - DNA, 201 bp, Homo sapiens
atggtaattagatagcttaatacagctgttacattttaaaaagatgggccagccttattaaatcaatagcattagcttcttgagttgtaaagcctgagaasaagaacagagaaatatgagaaagaaagagagacaatctgatagagggagagcccatcttctctcccctctcccactgtatggactgttctctaacacagt

SEQ ID NO: 19495 - DNA, 201 bp, Homo sapiens
tctgtttattgcctttcctgatttttatatttctcttgcagatcttttccaaattagcttcattttcttgttgttgcttcagttttaactaatgactgcakttcgacttcctgtaggcactggtagtaatgtgaactagttaccacatagaactgaactctgtggatgtcaaattgcaaaatttctggctctgattagaac

SEQ ID NO: 19496 - DNA, 201 bp, Homo sapiens
aaatggaagtactaattctgattggagccggaagagtctttgaaaatctggggaggagtagaccactggaactcagttctcaatcagttttaaggtcaacracatgaaaagtcagaattatccttgacagctaaggcctccaggctggggccagatgaagtagtgcctggtgtttagcacctaactgtgggatacttagta

SEQ ID NO: 19497 - DNA, 201 bp, Homo sapiens
ataagtaaaaatgcataaatgacctggaatcccacctaaggattaggaatttaatggtgatttaagccaatcaccaatctaatatttggagataaggcaaytggaggacctttgattattagtttagaaccacagtcagatgatatgtttgtagaaaggatggaggaactcaataaatggacatttcagcaataagtttga

SEQ ID NO: 19498 - DNA, 201 bp, Homo sapiens
aagtgactagttctgtggactagacattttcataaggggtaagggggacagggagaggaaatagtcattgttttagaaatgaataaagtttaaaagacackgtaatcatccagcatctttaaagagtgctatttattaagaattaacatataaaactattatcagtatattgaaaacaagacttttgtaccatggtgaagt

SEQ ID NO: 19499 - DNA, 201 bp, Homo sapiens
acaaaatattaagaatatatttgtaagtaaaacaaaaatataatttaatgggtttactcttgtcatttcatatagatacaaatcatttagaacaacagatkaatattttctgtgtgtgtagccatatatatgatatttatatttgaccatataaaatggaatgagagtatgcataatatgtgtgtgtttctactttggaat

SEQ ID NO: 19500 - DNA, 201 bp, Homo sapiens
ggtttctggtttaatgctaaagttatgtccagattatctagttctaggccctggaacactactggttagtaaaacacttgcttacaaagaaggttccaaaytttataaaagcatataacatctccagcaggcagaaatatctgtctacctaagagatgctagaattacagaccacgaaagtatcctccaattacacttcag

SEQ ID NO: 19501 - DNA, 201 bp, Homo sapiens
taaaagcatataacatctccagcaggcagaaatatctgtctacctaagagatgctagaattacagaccacgaaagtatcctccaattacacttcagatttwaaaaaagtgtgatcttcgagatttgcagacatttttgcaatttattgtctttgtttctgtgttagtcacatgaaatgggtccttatgtcataggaacaag

SEQ ID NO: 19502 - DNA, 201 bp, Homo sapiens
cctccccaacgagttcccatcagactgacggaggctgacttcttgaaaacccttcctgcaatatcgaggagctcttcctggtctcccatccaattgcttaycccgtgcagtttgagagattgtatctgtctcacagtttaaagatagaacagctgccaacagtcccaaacgatcattaataagttaaccgttaccagataa

SEQ ID NO: 19503 - DNA, 201 bp, Homo sapiens
gcaactattgagcccctcaaattaggtacagcagtaacctcccaccctgccaatcatgggcattttgtcaagctcaacaaacactaatttgagtgctaatrttctgtgctaaaggcactaatcattagttaaataaacaaaccatttgagtgtataactgtcaacaagaccaaaacctgctcacagagggatcaacctcat

SEQ ID NO: 19504 - DNA, 201 bp, Homo sapiens
ataggtattaaatgtacattgttttcctccctttctctatttaattgatgggttgatttcaaatttcttaatgtggcacaccccactgttaccatctgaaycaaactgtgttgctctggcaccttctttcactcccccatcctgagcctcactcaggggcatcagtgtccccaaactcatcaggcaggagtccgtgacctg

SEQ ID NO: 19505 - DNA, 201 bp, Homo sapiens
cgccatttcagagcttactgaatcaaagacttttacagccagagggaactttagcattttaaagataaatatgctccgtttttgtcagataccacctttgyatattaatccataatcttaacaagggaggaacaactgagaataatttacttctttataggaactatttgcatttttattattatgcaaaagcatgggagg

SEQ ID NO: 19506 - DNA, 201 bp, Homo sapiens
tttttaaataaatgttttaaaatgtttatctggtaaaaatcccctcttttcccccaccccatagtcactactagcaaaacccccatctggctgtaaagatmcttaaccagtttcatagttggtggccaggtgatgataagaggatggcaaccccttgaataaagcccactcctttatgtcggtcgttccatcatttaacac

SEQ ID NO: 19507 - DNA, 201 bp, Homo sapiens
aatattttccccagtgtctaataagaaataacattatgacaagatataaggcagagagttaaatataatatagtctcagtgtccacagagtttatctagtsggggagatagctgtaaaggagacgggggataaagaagaaaacaagaaagaggaagaagaagaggaaaaaaagaggtgacaaaagaggaaaacgaagagaa

SEQ ID NO: 19508 - DNA, 201 bp, Homo sapiens
acacagagttcagtgttgacctttcagagcgagaagggcctaagaagtgtgaagggcactgaggagtcggaacaggtgaagacaatgtgtaacacggtacsctgacctgtatagcgcccggtgggaaagcgatgaagacagaagagaaacctcaagggcaacatggttttaagcatttgtattttcaagatggaagagaca

SEQ ID NO: 19509 - DNA, 201 bp, Homo sapiens
agtgttgacctttcagagcgagaagggcctaagaagtgtgaagggcactgaggagtcggaacaggtgaagacaatgtgtaacacggtaccctgacctgtayagcgcccggtgggaaagcgatgaagacagaagagaaacctcaagggcaacatggttttaagcatttgtattttcaagatggaagagacatgcaacaattg

SEQ ID NO: 19510 - DNA, 201 bp, Homo sapiens
agcatttgtattttcaagatggaagagacatgcaacaattgttgttgaattcaaatacttgtatttttaatatgggctaaaagtaataaagctaatttatracaaatatgtgacagcgcagctacttcaaaataaacttacaagtgaataattctctcacatttttgctctcttctgaataattaaaaagtttaagtttaa

SEQ ID NO: 19511 - DNA, 201 bp, Homo sapiens
cctctgccctccagagggtcccaaaatatagtcctaaattgtgactttctgtgaggcccttcacttaaatagcatgggtccagtgtgacttgcggatattrcgaaaaacaaagcattacttttcaaagttcataaagcattatcccatttcctcattgtccttggtatttaaatatttttcttttcttaaagcttgcattg

SEQ ID NO: 19512 - DNA, 201 bp, Homo sapiens
cgagaaagagaatgagagaaatttttctttacaaacttttgttcctctggttctcccattacaaatttcagggtgaatcaaaccattccaacaaaacccayagagtactttttttctttttctttttcttttcttttctttttttttttttttttttttttgagacagagtttcattcttgttgtccaggctggggtgcaa

SEQ ID NO: 19513 - DNA, 201 bp, Homo sapiens
ccatttttaccctcttcccagcagtccatgtccagaagacagaatccggcctaataagtttgcttccatttctctctgtcattgtttttgctaaatagackcccatcatcagtatataaagtagactattccttagtcccacttaaattttaagtcactaagattaaaaaagaagttaataaagattccagggacgtaaaa

SEQ ID NO: 19514 - DNA, 201 bp, Homo sapiens
tggaagtcaggaactctgcttccttgaatcctgctggtattatatgtgtgaaagatggagccggctgacagaaggcaggtccatttttgaaagcctgcacrctctccacttaaaatagggcctttcaagttgcctgaatcagaaaggctaggatttgttacagctgtgaaagaatcctaataatgatgataaatctgtgaa

SEQ ID NO: 19515 - DNA, 201 bp, Homo sapiens
tccataccatattaggggaagaaatgagatggtaagaaaatatgagattcacggaattattttgtaagcaatttctgcaatgactctcacagaataagtasaatttgtcagaaaagcaattttaaaatgcacaacgatgtttaccttttgaaacccattatgatgaatcggaacaaaatgaacacggattatttgactatt

SEQ ID NO: 19516 - DNA, 201 bp, Homo sapiens
tcagttgctgtcacagcaagacttgagacagggcaaggaatgctggttctactctcggtcatctcatctagactaaaggaaaggaaaggaaaagcgcagasagggtaaatgcacaagtgaatgcaggggtattcagagctcaatagtaatagtatttaggtcaaatattaaagttgtccatttaattctcagctgactcat

SEQ ID NO: 19517 - DNA, 201 bp, Homo sapiens
tactgccagcactttgaccacagacttcatatcacatcaattatactgtggttccatgatagttatctgtattcctctcttattagccatatggagggagrgttcacgacttattcatctctgtgtccctccctgacccccttaacacttaaagttctgcactctgtgttcaaaaaatgcttttcaatttctgaaaatgaa

SEQ ID NO: 19518 - DNA, 201 bp, Homo sapiens
ataacaacccgacactaattcagtcaatgactgtggaaatggaaacatgtttatgggagaagattactatgaatatatattaatctcttctacgacctagyttaggttacaaaacctttatcacacaagtagcttggagtggaattaactgactcgaggctaaggaaaatgaacagatatgtttttaaggtgttaataaat

SEQ ID NO: 19519 - DNA, 201 bp, Homo sapiens
gatttttaaaacttcgcagtgaaaaattcaaatgttttactaccattcagctcattattggctggtaatcgccgacgaaaacatggtctattttgtgggaygtacttacaggagctgaatctcaaaaggcagattgtgtcacagaaggctgcctttaaaattatttagcattacaagttcagggatattagcatacatgca

SEQ ID NO: 19520 - DNA, 201 bp, Homo sapiens; identical to SEQ ID NO: 5181

SEQ ID NO: 19521 - DNA, 201 bp, Homo sapiens; identical to SEQ ID NO: 5182

SEQ ID NO: 19522 - DNA, 201 bp, Homo sapiens
atattttttggcaatcttttgaaatcagcctgaaagatcaaaatatttttcatccttcactgtgtaaatggaaatgtattttcattgatacagctattttmaatttcccacattttggattttacagcagggcataaggcttggctaatattttgtaatgctgaactcaaaaacagacacacagatcagtattgaaaagtg

SEQ ID NO: 19523 - DNA, 201 bp, Homo sapiens
tcctaaagtggggggcttcagccttgacttctgtatttggcattttggtctaataaaagccaagtaaaataaggaattaagaattagtacaatattatcayataatcaatgtgccatcatcctaagtatgaaactaaagaaactttaaaaactatatttcagagttttttttttttaagcacaaagccaagaaatcctttg

SEQ ID NO: 19524 - DNA, 201 bp, Homo sapiens
caagacatacaactgcaaggcctggtctcttttgttcactgctgaagccccagcatgcttggaacatagtaggtgctcatgaaatatttattgagcatctratccatggtctcaggtttctccttctatgaatcagcattagcatgtgtgctaaggatgaaactgaactgcatgttctaaattacaatgtacatcaatgga

SEQ ID NO: 19525 - DNA, 201 bp, Homo sapiens
catctggttctgatttaaggtgactttcctttttcacttaagagccggcttgccgtggctaaaaaggacccaagaacactttatagctctttggaccaacmctttctgcttcaaagcgggacgagctcttttattttgtagggttttatttgttctatattgtcactgtgaacccaggtcctccactacaatgaccagaat

SEQ ID NO: 19526 - DNA, 201 bp, Homo sapiens
tagaagaaagttacaaaagctttcaaaacttcaccctcaagatacaactgaacattggactggactttaaaactgtttaaggtgaaacgtgaaagctaaaragaagattgaagtgtaaatgcatgaagaggcgaattcaaagtatgtttgcttcttagtgagcaggtgaaaatgagagcttccctcagtagtagacaggaa

SEQ ID NO: 19527 - DNA, 201 bp, Homo sapiens
ttgtaaaaatctaacacgatcatgtacatgaaagttctttgtaagtggtaaagatctgtaaggtacaggctaacataatcatttctcagctatactttccsgctttctactaactggctagcaattgtataaacttcttattctttagcagggaaaattagcccttgcagacaactattttaggaaaagtgctaataatca

SEQ ID NO: 19528 - DNA, 201 bp, Homo sapiens
aatctttctgtttctggtcacctggattatttaaattcatgtttctttcaaaagctgattgaactacacctgccacttcacaatgatatgttgttctttgsttcttcctcattccaccctatgccttacaaaatgctgaatatcctttgtgagcgtttgaaaatctagcaatttttttcatgaactcctatgaattctact

SEQ ID NO: 19529 - DNA, 201 bp, Homo sapiens
atcatgtcagttacagtataaaaattgcattgtttttatgaaaactcacatgagaataaagaaattacaatagtacattcaagagaattaagcattcatcrcgcagttagctcttctccagttgcccaagatgccaaaaggaaagaagaccacagggaaggacggggtcccatcccctgctgttgtgataaagcaggaggc

SEQ ID NO: 19530 - DNA, 201 bp, Homo sapiens
aggagatctgcaccccagcctgcctagttcaccacctgccagctgtccatccctgtgctctgcatctttgtcccatggtccttctgcgtaagatgagaatygcacctcccacctcctggtgtgatcgtggggatgaagaagaaaactgtgtgtaaaacacctagcccaggacttggcaagagtcggagcccaataaatgtc

SEQ ID NO: 19531 - DNA, 201 bp, Homo sapiens
attaaacatatcagcaatcaatgatgctattaaggaccctatcataaaacatccacgtagaggcagagaataattagaaaaaatcagaaattaatctgcamtctcaggttctagagctctgccatccattgtcatcaacattccttaagatcataaatgtcaaaaaaaaaaagagctaatttgatttaaaagttgaaaaat

SEQ ID NO: 19532 - DNA, 201 bp, Homo sapiens
aatgtcgtagaaaagaagcgacttaaacatgctgcataaaagtgtagttccactgaaagtgtgatatatgaagaaaatgccattaagagctatttttatcscaaagatcttatcatcaaaatcaaagtgaagattacttttatgatttccaataagatttacttgatttcctcctaagagctgacaaataatattgcaaat

SEQ ID NO: 19533 - DNA, 201 bp, Homo sapiens
gtgccacgacactccagcgtggggtgacagagcaagactctgtctcaaaaaaaaaaaaaaaaagagaaaagagaaagaaattctcctgaataaggcacaaytaatgccagcaataatggagaaagatgtttttaattttaggaatgccattaaatctctgaaaatactaagggataatccacctatagtagaccaccactt

SEQ ID NO: 19534 - DNA, 201 bp, Homo sapiens
taaaccagaggcagtctaaatgatgcacatgattcaaagaactcaaaattatattactgttacttaaccagcttctccctgatcttaagctactccctggytcaagacacaagagagtcgcgaggtgttgctagtgctgagctacgcaacaggactcttgtgttccagcgcaagaggcactgtgcatcactctgcggatgg

SEQ ID NO: 19535 - DNA, 201 bp, Homo sapiens
actattaattttatgaatggaattgaaatttcactactatgttccatacggttcttaggacaagtgagtatcccctcaagatgttatctgtgtaaaaaggstaattcttcataggtacacaaagtagttacatgtaattcacagtatgcattattttttaagtagtcttactagatagcaggcaggaattataaattgttc

SEQ ID NO: 19536 - DNA, 201 bp, Homo sapiens
aacatggaaaggagagtaaagcctaaattagaaacgcctagtctgaatttcattaccttctttaagaggcctagagcttagcatcggtatatttgcacacktttggagaagttgtggacaggctgcagtccagaagagattcgttttctttagcaatgagactctccagttagtgcctaaggcagaaattgggggtagtta

SEQ ID NO: 19537 - DNA, 201 bp, Homo sapiens
agaaaactcaacagtgcctaaacagacccaaaatgtatagcagattaattgaaagggaaactatagtaagttccaggaggaaactgttacctagaacaatyggccggatcgcttaggtcctcagaactttttctggaccataaaagctagttaaaaagcctgtcttctcctttaaaaagtgtatcttctccaatagccttt

SEQ ID NO: 19538 - DNA, 201 bp, Homo sapiens
agcataaagggatcccaacctacacttctagccttctctatagccattctaacctgataaatgccacattttaaacacacctactgatcacaccgctggcraacatccagtgatcttcccacctctctgccttctccccctagtctctcaatcggcctggtgactttcttcttcaaggcccaactcagaggtcaccttctc

SEQ ID NO: 19539 - DNA, 201 bp, Homo sapiens
aacaagttttaagtagattttttttggcttccatttaaaaattcttattgttgatgtgcaaaatagttaacaattcaaggaaaaggtcaaatgggttaatsgagcctgtgtaaacagtgactacttccacatcagaataacatgtactgcaattcatatgcctcaaaaattattccgtatatgccagaaagattatgtgtt

SEQ ID NO: 19540 - DNA, 201 bp, Homo sapiens
gtcaatcctgtgactcaatttcacaggtagagtcaaaggtcattgattgctcttatttttgatcatgttctgtaagaagcagctaattttaaaggatcacktcaggcctttcaagtatcatgaaacagtccacttggatctgctatatacatgtttgtctctcagcacccagcccagtgtccgacatagaacaagtgtcct

SEQ ID NO: 19541 - DNA, 201 bp, Homo sapiens
tcctgcttctgtctagtgtggcagagcacatgcattgatgaactagcaaattagtaacaaactcttaaaggcaaaaacgaagtgaactcagagacgacgcrtgtattaaaggcagctttcatactgaagatattgttgaacctcgtgtgaatttgagttaagagtgcaatagacagaagacaaaccccatgccttaccaaa

SEQ ID NO: 19542 - DNA, 201 bp, Homo sapiens
tgaacacttactctgtgcctcgcactgtgagaggtcctaggggaaacaaagacagatgagactatccctgtactcaaataactcacagcctggaagacatrctataatacaagtcaaaggggattaattgctataaccaaaattgcactgctatagaattgcagagaataatgctgcaacaaggagtctgtctgcattgca

SEQ ID NO: 19543 - DNA, 201 bp, Homo sapiens
agcagcttccgtagctactaatctagaatgagggattattcctgggacaagggacaactgtaagggagatacaagaagccttgagggtggaggaaagtcartagtgtgcaagttggtcctatctgcctggatgtcagtgctctgggatgagggggcagtagacaatggcattgcagagtgaagcaatgactaaaggggaaa

SEQ ID NO: 19544 - DNA, 201 bp, Homo sapiens
ttgtggtgtttagttctcaaaacagctcagcgggaaaggttctattatcctccactttgtagatgaattaataaaagatctttgaaattaattgccatctrtggttagtaagaagttgagttgaactttaaacatagatgttctggcttcatgtgtggggcttgccctctatttattgatattgatgttaaaagaatagga

SEQ ID NO: 19545 - DNA, 201 bp, Homo sapiens
atgggccacacaataggcaagatacccattatttagttactcactcttctgcttcatacacaaagaaatgctgagatttattactgtaacatattcctacsttagggataagacataagcattctgtcttaagtagtataaaggcatataagacatttctttagtcttttatttgtcaggttgttacatttttcttcctag

SEQ ID NO: 19546 - DNA, 201 bp, Homo sapiens
tatggcaatggttacatttttctctttctatttttcaaagggccggctgactaaattttcttttttccatctggggaaaaagagcagatatttgtttcacrttaagttactttagaacagcagctctcaaacctgagtatgtgacagaatcaactgggggtcccaacaaccagaatttctgattgaaaaggtctgggatag

SEQ ID NO: 19547 - DNA, 201 bp, Homo sapiens
ctgttctccaagcattcagatggctgaggcagacaaaataggctaaaatttcctatttggtaagcaagagattttggtttaactttaataaggaacttccyggaaagaatctaaatctcttactgcaatttaacttaatgttacaaggttaattaagcacaaacaggctaccaaggaaagttatggaatcttggctcttag

SEQ ID NO: 19548 - DNA, 201 bp, Homo sapiens
gcatggttaattctggaaaatagatgaacttttcaagcccacaagggaactgttgggagcattaaagtagtaatttcaaaatattaccaacctcaagagtrtttctatggttctataatagagagtcaattactatttcaagtcattttcttaaaaccttaaaatttggtaatcgcacatttagcttataaagtgctacat

SEQ ID NO: 19549 - DNA, 201 bp, Homo sapiens
gtagctggaaaagaggagatgtactcaagagttaggccaaaaagtagaatcaacactctctggactcaagagttaggccaaaaagtagaatcaacactatytggaattaaccaaaggcagaatgacaagggagactccccaagtctctgttttgggtgtttgaacaggtggtgttaacacttctgattataagccataaag

SEQ ID NO: 19550 - DNA, 201 bp, Homo sapiens
cacatgaaagctgtcctggatatatacatgctcttcaattttatattcaaaatgtactttaggaactgtatgtcaaatgcttagttgtaactgattccagraaaacataatattgctatattttatcattcttatttttaatcttgagatttgagggatcaagtaagaaagagacagaattccagagggtgctgggggtcg

SEQ ID NO: 19551 - DNA, 201 bp, Homo sapiens
ctcccctttgacaatgtccattttatcatatgttgccagaaacatgtcaaagccaaaactggaagacttgctggaaacagcatgcttgcttctactcaaarccttatttattctgcattgtgagagatgattggtgccccttgtcttactttctggaatgtcaccatgtgatgcccttttgctgaaaaatttggagaacaa

SEQ ID NO: 19552 - DNA, 201 bp, Homo sapiens
tctatgttttatttttccctttgaggtacttctctttttgtttcctttctttctaccacaagctcagcccaccacctcaaagcaatccaataaaaagttascaactcctagttttgcactttgtgctaccatttaatctcatttgcagcattgcaccagcaaagggagatgtgaaactaacaagagatatgtaaataaaaa

SEQ ID NO: 19553 - DNA, 201 bp, Homo sapiens
caatgtgatttcaatccatcaaaacctctttctcttggaggaaaatcctatttatttctactctatctcctaagcacaatgagcagcttttctgtgtggawgatccctgccctccaagatgcagccctacccaggaaaggctgcagaaaccagcatgccaggctcactctctaaccgaaaagctctggaaagaagaaagaa

SEQ ID NO: 19554 - DNA, 201 bp, Homo sapiens
actgacaatctagcactaagaatatattttgtctttcatgctattctctctgcattttttggttttcaagaataaacttcttttttttttttttccaaacyaaaaccttctggaagtcaggaactctgcttccttgaatcctgctggtattatatgtgtgaaagatggagccggctgacagaaggcaggtccatttttgaa

SEQ ID NO: 19555 - DNA, 201 bp, Homo sapiens
tacatctcctctctctctctgtctctctctctctctctctctctctctcacacacacacacacacacacacacacgaccttcattgtaccccagtatactrccttcttaaaatggtacattgaatatacaggcccaaccttctgtgggcacaaacaacttttacgcttaacacatctatatttaaaggatttctcaggggc

SEQ ID NO: 19556 - DNA, 201 bp, Homo sapiens
ctgagttgtcttttaagaaaataaaagacctaaacacatttttaggtagaaggaattcaacccaaagcaagagacaaaatatttaaaatacagagacataytagaaggtcaagtacacatttagacatgctaatctaaataggaaaaagaaaaaagggaataaaagaaaataaagagcaggggaggagttttcttccacag

SEQ ID NO: 19557 - DNA, 201 bp, Homo sapiens
cgggagtggtggcaggtgccctgtaatcccagctactcaggagactgaggcaagagaatcgcttggacctgggaggcagaggttgcagtgagccgagatcrtgccattgcactccagcctgggcaacagagcaagactctgtctcaaaaaaacaaaaacaaaaaacaaaaacaaaaccttaatttgtttgggtttatattt

SEQ ID NO: 19558 - DNA, 201 bp, Homo sapiens
attattccagcagggtttcccatgactgaattgccttataaaaaaacccaggcacagataattctgaaatggatgcatttcttgggcagcatttcaaaactaatttattgctttcttcaaatgattaataatggaaggtttgatggggagggagcccatcagaatcatacaaatcatgggatactgacccaaaagtctaca

SEQ ID NO: 19559 - DNA, 201 bp, Homo sapiens
ccacccgccttggcctcccaaagtccaaagtgctgggattacaggcgtgagccaccatgccctgcctccttttttttttttttttttttagacagagtctyactctgtcaccaaggctggagtgtggtggcgcaatctcagctcactgcaacctctgtctcctggactcaagtgattctcgtgcctcagcctccagagtag

SEQ ID NO: 19560 - DNA, 201 bp, Homo sapiens
gacagagtgagactctgtctcaaaaaaaaaaaaaaaaaaaaaaatatccctgaggggatggatgtaaagttacacaagcttgtctggatttcccatcatarggcctttgtattcacttatttaataatagttcagaagaagctatctcagctgtacaagaagtaattcagtttcagaacatttctcactccaacaaggtgc

SEQ ID NO: 19561 - DNA, 201 bp, Homo sapiens
aagatcatacaaatgcccccagagtctctctgcaatcacctgtagttttaagatgcttctgcaaatcctaccagaactctcatctccttcactgggctgcmcccatggagcacactccctctgtacaacagccctggccttacctgcgtctctcagttgtgcaggaagcaaagggaagggaaggggacaggaggcctaaat

SEQ ID NO: 19562 - DNA, 201 bp, Homo sapiens
agacatgtccaggcccggatgttagggtcagggtggtgaccccaagaggcagagtcacacgggaatcttcacagagtacattccttggcactaccacttcyggcaggaggccaggcagcatgtccctatcccctccccaaaggcagtggcactggctgccctgaaggagaacccagacatactgacctcagaggggaggat

SEQ ID NO: 19563 - DNA, 201 bp, Homo sapiens
caccaagaagctggagggccaggcaagtccaggatgggcaagcagggaagcacgagagggagaaacagaggtgaggaaggaaggagggactccagaaaggrgacccaccaggcggagggagagccaagtagaggacagacagggaagcaagagaggcagagcagctgcggacctccagacacttggtggggatccaacagc

SEQ ID NO: 19564 - DNA, 201 bp, Homo sapiens; identical to SEQ ID NO: 12001

SEQ ID NO: 19565 - DNA, 201 bp, Homo sapiens; identical to SEQ ID NO: 12002

SEQ ID NO: 19566 - DNA, 201 bp, Homo sapiens; identical to SEQ ID NO: 12003

SEQ ID NO: 19567 - DNA, 201 bp, Homo sapiens; identical to SEQ ID NO: 12004

SEQ ID NO: 19568 - DNA, 201 bp, Homo sapiens; identical to SEQ ID NO: 12005

SEQ ID NO: 19569 - DNA, 201 bp, Homo sapiens
cccagttccacactgcatcccaaggggcagactcacttgtggtagtcggtgacacagtatacttggttggagaagtccactgtgaaggggatgccatccargcacttgttgcaaacaatgcatcggaaacagcctggatgataggacttccccattgcttgtaggatctggctcatggggtagcaagagaatcagtctccc

SEQ ID NO: 19570 - DNA, 201 bp, Homo sapiens
agggaggggctaggtcatagaagcctgggttgacaggcttttgagcccagacttgatcccataggcagagggaagccactgtaaacagttgctctggggakgaatgggatgaaagtgattcatctggtgacaggcttctttccccaaccttctctcaatatccatttagtccctgatcccgctcctcagcctcacagtgag

SEQ ID NO: 19571 - DNA, 201 bp, Homo sapiens
tccctatcccctccccaaaggcagtggcactggctgccctgaaggagaacccagacatactgacctcagaggggaggatgggttggccacaggctgcacayttaggagcataatttctgaaagagagagggaagagatgagctgaggctggggaatccctggacccagttccacactgcatcccaaggggcagactcactt

SEQ ID NO: 19572 - DNA, 201 bp, Homo sapiens
ggatgggttggccacaggctgcacacttaggagcataatttctgaaagagagagggaagagatgagctgaggctggggaatccctggacccagttccacaytgcatcccaaggggcagactcacttgtggtagtcggtgacacagtatacttggttggagaagtccactgtgaaggggatgccatccaggcacttgttgca

SEQ ID NO: 19573 - DNA, 201 bp, Homo sapiens
ggaggaatgggatgaaagtgattcatctggtgacaggcttctttccccaaccttctctcaatatccatttagtccctgatcccgctcctcagcctcacagygagacttctcagctgaaagcactttacttaccttctccaaaatcaagtgaccacagacacagcatttctcagctgcctcctgaaaccctgaaaactaaag

SEQ ID NO: 19574 - DNA, 201 bp, Homo sapiens
gtccaggatgggcaagcagggaagcacgagagggagaaacagaggtgaggaaggaaggagggactccagaaaggggacccaccaggcggagggagagccargtagaggacagacagggaagcaagagaggcagagcagctgcggacctccagacacttggtggggatccaacagctgctctgtgagcaaatgaagaggcac

SEQ ID NO: 19575 - DNA, 201 bp, Homo sapiens
ctccagacacttggtggggatccaacagctgctctgtgagcaaatgaagaggcacaagctctcctcctgttccccatagcacttgtaagtgtgtatgtggrcaggggaggggagtgcttgagtattggggctacactcaccacaagagcagcaaacaaagcactgggtgtggtagaggctgtccagggcctggcaggcatt

SEQ ID NO: 19576 - DNA, 201 bp, Homo sapiens; identical to SEQ ID NO: 12012

SEQ ID NO: 19577 - DNA, 201 bp, Homo sapiens; identical to SEQ ID NO: 12013

SEQ ID NO: 19578 - DNA, 201 bp, Homo sapiens; identical to SEQ ID NO: 12019

SEQ ID NO: 19579 - DNA, 201 bp, Homo sapiens; identical to SEQ ID NO: 12020

SEQ ID NO: 19580 - DNA, 201 bp, Homo sapiens
atccgggaggcggagcttgcagtgagccgagatagcgccactgcactccagcctgggcgacagagtgagactctgtctcaaaaaaaaaaaaaaaaaaaaaaatatccctgaggggatggatgtaaagttacacaagcttgtctggatttcccatcatagggcctttgtattcacttatttaataatagttcagaagaagct

SEQ ID NO: 19581 - DNA, 201 bp, Homo sapiens
aatccgggaggcggagcttgcagtgagccgagatagcgccactgcactccagcctgggcgacagagtgagactctgtctcaaaaaaaaaaaaaaaaaaaaaaatatccctgaggggatggatgtaaagttacacaagcttgtctggatttcccatcatagggcctttgtattcacttatttaataatagttcagaagaagc

SEQ ID NO: 19582 - DNA, 201 bp, Homo sapiens
gaatccgggaggcggagcttgcagtgagccgagatagcgccactgcactccagcctgggcgacagagtgagactctgtctcaaaaaaaaaaaaaaaaaaaaaaatatccctgaggggatggatgtaaagttacacaagcttgtctggatttcccatcatagggcctttgtattcacttatttaataatagttcagaagaag

SEQ ID NO: 19583 - DNA, 201 bp, Homo sapiens
tgaatccgggaggcggagcttgcagtgagccgagatagcgccactgcactccagcctgggcgacagagtgagactctgtctcaaaaaaaaaaaaaaaaaaaaaaatatccctgaggggatggatgtaaagttacacaagcttgtctggatttcccatcatagggcctttgtattcacttatttaataatagttcagaagaa

SEQ ID NO: 19584 - DNA, 201 bp, Homo sapiens
tattttttttattttttttattttttgagatggagtcttgctctgttgcccaggctggagtgcagtggcacgatcttggctcactgcaagctccgcctccygggttcatgccattctccagcctctgcctcccgagtagctgggaccacaggcactcaccaccacgcccggctaatttttttgtattttttagtagagaca

SEQ ID NO: 19585 - DNA, 201 bp, Homo sapiens
atttccctggtcctgagagagctccaagtggtggaggggaagatactctctaaggagtaaggcagagagaaaaccatcaccagatttatttattttttttwttttttttattttttgagatggagtcttgctctgttgcccaggctggagtgcagtggcacgatcttggctcactgcaagctccgcctcccgggttcatgc

SEQ ID NO: 19586 - DNA, 201 bp, Homo sapiens
acctcaggtgatccacccgccttggcctcccaaagtccaaagtgctgggattacaggcgtgagccaccatgccctgcctccttttttttttttttttttttagacagagtctcactctgtcaccaaggctggagtgtggtggcgcaatctcagctcactgcaacctctgtctcctggactcaagtgattctcgtgcctcag

SEQ ID NO: 19587 - DNA, 201 bp, Homo sapiens
tttttaaaatttttgaatagagatggggtcttgctatgttgatcaggctggcctcaagcaatcctcccatctccacctcccaaagtgctgggattacaagygtgaggcaccatgcctggccttttgtttctaataattactttgcaattgttgacatgttgcttgtaatcttttcaagtcattttatgcattcatttgtct

SEQ ID NO: 19588 - DNA, 201 bp, Homo sapiens
gctcttgttgcccaggctggagtgcaatggcatgatctcagctcaccacaacctccacctcccaggttcaagtgattctcctgcctcagcctcccgagtarctgggattacaggcatgcgccaccacgcccggctaattttgtatttttagtggagacacggtttctccatgttggtcaggctggtctcgaactctcaacc

SEQ ID NO: 19589 - DNA, 201 bp, Homo sapiens
ttatgtgaaatttctgttataaatgttggcaaccagttttttttttttttattttatttatttatttatttatttattttgagacagagtttcgctctgtygcccaggctggagtgcagtggcgcaatctcggctcactgcaacctcagcttccggggttcaagtaattctcctgcctcagcctcccaagtagctggggtt

SEQ ID NO: 19590 - DNA, 201 bp, Homo sapiens
aaacaaacaaaaccttagaaatccagctcttcatataaaatatccagatttttatgtgaaatttctgttataaatgttggcaaccagttttttttttttttattttatttatttatttatttatttattttgagacagagtttcgctctgtcgcccaggctggagtgcagtggcgcaatctcggctcactgcaacctcagc

SEQ ID NO: 19591 - DNA, 201 bp, Homo sapiens
caaacaaacaaaaccttagaaatccagctcttcatataaaatatccagatttttatgtgaaatttctgttataaatgttggcaaccagttttttttttttttattttatttatttatttatttatttattttgagacagagtttcgctctgtcgcccaggctggagtgcagtggcgcaatctcggctcactgcaacctcag

SEQ ID NO: 19592 - DNA, 201 bp, Homo sapiens
acaaacaaacaaaaccttagaaatccagctcttcatataaaatatccagatttttatgtgaaatttctgttataaatgttggcaaccagttttttttttttttattttatttatttatttatttatttattttgagacagagtttcgctctgtcgcccaggctggagtgcagtggcgcaatctcggctcactgcaacctca

SEQ ID NO: 19593 - DNA, 201 bp, Homo sapiens
ccctagacttgctacctctcagggacatcccacactgcatcaaccacaaccccaaaactctggggtttgggggagctggagggagaattacactttgattyggttctagtcagtttagctgaaactaattgatttaaagctaggtcctctactcctggaatccaggaccagaacattgcgtgactcatgcataatcataca

SEQ ID NO: 19594 - DNA, 201 bp, Homo sapiens; identical to SEQ ID NO: 12029

SEQ ID NO: 19595 - DNA, 201 bp, Homo sapiens
agactgaagataggtcacaatatctttctggtttcccatgccctacacctctcccatagatgtctggttgttgcaggacttgactcctcccctctccccakttccacttcttctccagcaccgctgaaccccaacactcacctcacagtggtagcactcaaagtgataatcccggtccatggatatcaccctcacgatgtc

SEQ ID NO: 19596 - DNA, 201 bp, Homo sapiens; identical to SEQ ID NO: 12032

SEQ ID NO: 19597 - DNA, 201 bp, Homo sapiens
caaagatgccagtccacaggtgctcagcagcagacttgaaaatactttctagagaaagcaggctaggcccagaaatcgtctctgggacttcagtttcccakcagtcaaacgagctgttcagttatagaatgatttctctccactgcagacttccaaggatggagaaaaggatctggcttggcagagggctccgtgcagagg

SEQ ID NO: 19598 - DNA, 201 bp, Homo sapiens
actgcatcaaccacaaccccaaaactctggggtttgggggagctggagggagaattacactttgatttggttctagtcagtttagctgaaactaattgatytaaagctaggtcctctactcctggaatccaggaccagaacattgcgtgactcatgcataatcatacactaggccagacacagtggcttacgcctataatc

SEQ ID NO: 19599 - DNA, 201 bp, Homo sapiens
ctcaccaccctagacttgctacctctcagggacatcccacactgcatcaaccacaaccccaaaactctggggtttgggggagctggagggagaattacacyttgatttggttctagtcagtttagctgaaactaattgatttaaagctaggtcctctactcctggaatccaggaccagaacattgcgtgactcatgcataa

SEQ ID NO: 19600 - DNA, 201 bp, Homo sapiens
gcagatccattcttgtttatttaattactcaacagatattttctgagcatctgttttgtgcttaacacagcaccactacctaaggaaacctggagaaagtmgaagatatggtccctggcattcagatgcttagtttctgttggggagaaaagactacacaggcaaggtatgatctctgttgcagtgtgtaggatgaacggt

SEQ ID NO: 19601 - DNA, 201 bp, Homo sapiens; identical to SEQ ID NO: 12036

SEQ ID NO: 19602 - DNA, 201 bp, Homo sapiens
tgggtgtggtagaggctgtccagggcctggcaggcattgctctgcccatagatgcctttgttgcacttgatacaggtgcctgagaagagaaaagtgtcacmctctactcccccaggtcaaaaccagggattcccaagctttcctgactgccctttcctgatgtgccaggggtcacagtctccctttgatgggctcccttct

SEQ ID NO: 19603 - DNA, 201 bp, Homo sapiens; identical to SEQ ID NO: 12038

SEQ ID NO: 19604 - DNA, 201 bp, Homo sapiens
acatactcaagtattcctgagctagactcctgtaagggtgggaggtcagggtgtaggaagataaattagacataactcctgccctcaatccaactctaccrtttcagacattgctgttgacctggtcttctaaaaactattcatgtatgtttttaatttagtgataaatgtaaatgagagtctgagaaaaagtctacataa

SEQ ID NO: 19605 - DNA, 201 bp, Homo sapiens
ggttctgtcaaaggaggcaacctgactcccaaggagaaggggcccccatctctgaattcaaaatgtggcttcctcatggaagtgaagatctgccccaagaytgccatgccagggggtcctgtcggagccattctttaggaaaccttggacgttatgggaaaagcaaacgaaactgctcaggcacgttggcctcacctcctc

SEQ ID NO: 19606 - DNA, 201 bp, Homo sapiens
tggggaaaagaatgggggtggaggctgggggttgagttatgcccttatagcctgccgccctgctacctctgaacctcctacccaaccatccctccctggcsgcgttcctcttcctattcacttttctagccatagagttctacagcatggggtccaggagtggggcatgagtggtaagaagagatgcttagaaaagtgaaa

SEQ ID NO: 19607 - DNA, 201 bp, Homo sapiens
taccatttccctggtcctgagagagctccaagtggtggaggggaagatactctctaaggagtaaggcagagagaaaaccatcaccagatttatttattttwtttattttttttattttttgagatggagtcttgctctgttgcccaggctggagtgcagtggcacgatcttggctcactgcaagctccgcctcccgggttc

SEQ ID NO: 19608 - DNA, 201 bp, Homo sapiens
ggtgcgatttcggctcactgcaagctccgcctcccaggttcacaccattctcctgcctcagcctcctgagtagctgggactacaggcacccgccaccacamccggctaattttttgtattttttagtagatacggggtttcaccgtgttagccaggatggtatcaatctcctgacctcgtgatccgccctccttggcctct

SEQ ID NO: 19609 - DNA, 201 bp, Homo sapiens
atatgtcccagtaaagatttgctcatgttttcaaggtaaaacttcagtccttcacaaccagtgccaagtgtggatattccagaggcccctatagaagcaakaaacccattcttaggtattcctcactgtaaggtaggagagggcagagagaactgagattggttagactcttttcatggaactttaccataagggctctga

SEQ ID NO: 19610 - DNA, 201 bp, Homo sapiens
aaaatacaatcattcacttcttaaatgctctttaatgataaagccaagaacatactcaagtattcctgagctagactcctgtaagggtgggaggtcagggygtaggaagataaattagacataactcctgccctcaatccaactctaccgtttcagacattgctgttgacctggtcttctaaaaactattcatgtatgttt

SEQ ID NO: 19611 - DNA, 201 bp, Homo sapiens
ccactggactccagcctgggcaacagagtgagactccatctcaaaaaaaaaaaaaagaagacgactcaggaccccaggctgggcatggtggctcacgcctrtaatctagcactttgggaggctgaggcaggaggatcacttgaggccaggaattcgagaccagcctggccaacatggcaaaaccttttatctactaaacat

SEQ ID NO: 19612 - DNA, 201 bp, Homo sapiens
agtgggagatcacttgaggccagaaattcaagaccagcctgggcaacatagtgagatgctgtctctaaaaaaaaattttttaaacttagccagtcatggtkgtgcacacctgtagtcccagctacttgggaggctgaggcgggagaatcgcttgaacccgggaggcagagattgcagtgagccataattgtgccactgcac

SEQ ID NO: 19613 - DNA, 201 bp, Homo sapiens
cacagcagtttgtctgcagggtgacagcagcagcagtgattgcagctcagatatagttggcagggggttgtcgggcattgagccgctgcatgtggcaaccrtggcagagcaagtgcccatccagagggaaacagcagcagccttcctcatcactcagctgcatccggcagtcctagggaagaaggcacctagttcacctca

SEQ ID NO: 19614 - DNA, 201 bp, Homo sapiens
ttgctacctctcagggacatcccacactgcatcaaccacaaccccaaaactctggggtttgggggagctggagggagaattacactttgatttggttctastcagtttagctgaaactaattgatttaaagctaggtcctctactcctggaatccaggaccagaacattgcgtgactcatgcataatcatacactaggcca

SEQ ID NO: 19615 - DNA, 201 bp, Homo sapiens
gtcatcatttccagtaagaaactcactgagtgacagaaaatgaagactaaagatcaaagattactaaattaatttgcctaaaaccaattcacctaaaaccrattagtctaaaataaatatttatcaaatctgcagcatttcaaaaggatttagcagattcacccttttagttattactgttgtctgtataacttttcattg

SEQ ID NO: 19616 - DNA, 201 bp, Homo sapiens
gattgcaccattgcacttcagcctgggcaagagagcgagattctgtcaaaaaaaaaaaccctgagagccgggcacagtggctcatgcctgtaatcccagcmctttgggaggccgagacaggcagatcacaaggtcaggagatcgagaccagcctggctaacacagtgaaaccccgtctctactaaaaatacaaaaattagc

SEQ ID NO: 19617 - DNA, 201 bp, Homo sapiens
tttccctggtcctgagagagctccaagtggtggaggggaagatactctctaaggagtaaggcagagagaaaaccatcaccagatttatttattttttttawtttttttattttttgagatggagtcttgctctgttgcccaggctggagtgcagtggcacgatcttggctcactgcaagctccgcctcccgggttcatgcc

SEQ ID NO: 19618 - DNA, 201 bp, Homo sapiens
catgctggctcacggcaacctccgtctcctgggttcaagcaattctcctgcctcagcctcctgagtagctgggattacaggcgcccactaccacacccggmtaattttttatatttttagtagagatgggatttcaccatgttgaccaggctggtctcaaactcctgacctcaggtgatccacccgccttggcctcccaaa

SEQ ID NO: 19619 - DNA, 201 bp, Homo sapiens
ttttcaagtcattttatgcattcatttgtctccctggctagactgtgacctcctcaaggacagggactctcagtatatttcctttgcttctcctaatgtgkttttttttttttttttttttttgagacggagtctcactttgtcacccaggctggagtgcagtgggaccatgctggctcacggcaacctccgtctcctggg

SEQ ID NO: 19620 - DNA, 201 bp, Homo sapiens
cactgcaacctcagcttccggggttcaagtaattctcctgcctcagcctcccaagtagctggggttacaagcttataccaccatgcccagctaatttttgktttttagtagagacggggtttcaccatgttggccaggctggtttcgaactcctgacttcaagtgatctacctgcctcagcctcccaaagggctgggatta

SEQ ID NO: 19621 - DNA, 201 bp, Homo sapiens
tctgtcgcccaggctggagtgcagtggcgcaatctcggctcactgcaacctcagcttccggggttcaagtaattctcctgcctcagcctcccaagtagctkgggttacaagcttataccaccatgcccagctaatttttgttttttagtagagacggggtttcaccatgttggccaggctggtttcgaactcctgacttca

SEQ ID NO: 19622 - DNA, 201 bp, Homo sapiens
tacaatcattcacttcttaaatgctctttaatgataaagccaagaacatactcaagtattcctgagctagactcctgtaagggtgggaggtcagggtgtargaagataaattagacataactcctgccctcaatccaactctaccgtttcagacattgctgttgacctggtcttctaaaaactattcatgtatgtttttaa

SEQ ID NO: 19623 - DNA, 201 bp, Homo sapiens
tgggcaacagagcaagactctgtctcaaaaaaacaaaaacaaaaaacaaaaacaaaaccttaatttgtttgggtttatatttaaggaggtgcttctaacarccccagggtacctatctccatacttaattgttggttccgagttccagtgaggcacttatttgttgaaaaacgaattttcggccacaaccacactacaaat

SEQ ID NO: 19624 - DNA, 201 bp, Homo sapiens
gaatggtagataacatagaaaaagacatccataaaggtaggaagcaatctcatcatttacaaagtgctgcaaatttgataaatttatgttgctgataatarctcagaagtactcttggatgaatagatataaatccttgaaatatccaaagcatgacaaaaaagaataggacacctaaatggatataaacacaccaaaata

SEQ ID NO: 19625 - DNA, 201 bp, Homo sapiens
aataggaattgagcttttggcaaattagtcattaagtcattaactttaagcaaacaagttttcagtaaattggttttaagagatctagctttaggtgaacyagtttcaagcaaactgactagtatcaaatcagtgttttgctccctccagttccccccaactctagttttgggattgtgatggatgcaatccgggacccct

SEQ ID NO: 19626 - DNA, 201 bp, Homo sapiens
aggaattgagcttttggcaaattagtcattaagtcattaactttaagcaaacaagttttcagtaaattggttttaagagatctagctttaggtgaactagyttcaagcaaactgactagtatcaaatcagtgttttgctccctccagttccccccaactctagttttgggattgtgatggatgcaatccgggacccctctg

SEQ ID NO: 19627 - DNA, 201 bp, Homo sapiens
gcaaattagtcattaagtcattaactttaagcaaacaagttttcagtaaattggttttaagagatctagctttaggtgaactagtttcaagcaaactgacyagtatcaaatcagtgttttgctccctccagttccccccaactctagttttgggattgtgatggatgcaatccgggacccctctgagaggtggcaagtgag

SEQ ID NO: 19628 - DNA, 201 bp, Homo sapiens
ctggtgacctcgacctcaaagaaagtctcctcctctggactgggatagaagagatggagcctgggcccagttaggctttcagacatgtccaggcccggatrttagggtcagggtggtgaccccaagaggcagagtcacacgggaatcttcacagagtacattccttggcactaccacttccggcaggaggccaggcagcat

SEQ ID NO: 19629 - DNA, 201 bp, Homo sapiens
ccacaggtgctcagcagcagacttgaaaatactttctagagaaagcaggctaggcccagaaatcgtctctgggacttcagtttcccatcagtcaaacgagmtgttcagttatagaatgatttctctccactgcagacttccaaggatggagaaaaggatctggcttggcagagggctccgtgcagaggggaccatgtgagc

SEQ ID NO: 19630 - DNA, 201 bp, Homo sapiens
cttgcctttcctgggtgtgttcttccctccctccactccccaattccaggcccatgagtgagggctagggcctgtctttggggagcagatcccaacgggcytgccccacctctccccctcggcacgctgccacactccctgcctgttggggcccatcccagtctttgcccaggggcttgggagcctgtgcagcagctgcag

SEQ ID NO: 19631 - DNA, 201 bp, Homo sapiens; identical to SEQ ID NO: 12058

SEQ ID NO: 19632 - DNA, 100 bp, Homo sapiens
ctccctccagctcccccaaaccccagagttttggggttgtggttgatgcrgtgtgggatgtccctgagaggtagcaagtctagggtggtgagttcctgct

SEQ ID NO: 19633 - DNA, 201 bp, Homo sapiens
actccagcctgggcaacagagcaagactctgtctcaaaaaaacaaaaacaaaaaacaaaaacaaaaccttaatttgtttgggtttatatttaaggaggtgyttctaacagccccagggtacctatctccatacttaattgttggttccgagttccagtgaggcacttatttgttgaaaaacgaattttcggccacaaccac

SEQ ID NO: 19634 - DNA, 201 bp, Homo sapiens
tagtcccagctacttgggaggctgaggcaggagaatcgcttgaacccgggaggttgaggttgcagcgagctgagatctcgccactgcactccagcttgggyaacagagtgagacttcatctcaaaaaaaaaaaaaaaaaagtatatatatcaggccgggcgtggtgtctcatgtctgtaatcctagaactttaggaaaccg

SEQ ID NO: 19635 - DNA, 201 bp, Homo sapiens
tagcccaggcatagtagctcatgcctgtaatcgcagcactttgagaggccaaggcgggcggatcatgaagtcaggagttcaagaccagcctggtcaaaatrgtgaaaccccatctctactaaaaatacaaaaattagctgggcatggtggtgcatgcctgtagtcccagctacttgggaggctgaggcaggagaatcgctt

SEQ ID NO: 19636 - DNA, 201 bp, Homo sapiens
cctctgaggaatggctcaccacagtagaacctctgtgtccttttcaggtgcttgcagatgtgtttgatgccccggtgtatgttatagacactgccaactcsgcctgtgtgggttctgcataccgagcttttcatggtaggttgatggagggagacagctatctctggaagtggccaggacatggggtgggctgaggagggt

SEQ ID NO: 19637 - DNA, 201 bp, Homo sapiens
catttgctaaacatacttcctaaatcttctgccttgtctttggtgaaatggctaaaaagtacagggacagcctggggagctgtggctctccactacggacytcccccagctcatcctgactctattatcaccagggtagcatgaccaagcatactcctcttaaggcagtcgaggtggaatggaaggggtcagaagacatat

SEQ ID NO: 19638 - DNA, 201 bp, Homo sapiens
catattggccaggttggtctttaactcccgacttcaggtgatctgcctgccttggcctcccaaagcactgggattataggtatgagccaccgtgcccagcygaaatgccagttttaagttgttaaatacatggcagaatgtctggttacagtttttatctgttttgtgaaggcaacattttttggtgagcttttattgtct

SEQ ID NO: 19639 - DNA, 201 bp, Homo sapiens
aaactgcatctgaactgagaaaaccataactacctggtgagaagtcttcctcagggcctccttgagtgcagtgactcctcctggtcctgcctcctacctamtaagttgttacaggagatacttttgtagggcatatgaggttttgaagccagggtcattcttttgtctgtatgatgtggatctcaactctttttttttttt

SEQ ID NO: 19640 - DNA, 201 bp, Homo sapiens
ggctctggaacatgaattataccacagagctgattttaccttgggacaagggggccaacaggccaccctggggaggttaaatctcctgtgagcggtggccyatgctcagccaaggtcagctttcttgaggaggtagtgctgcaagccattagtagccagtactcacagcagctggggcaggatgcacaatggtccagtgag

SEQ ID NO: 19641 - DNA, 201 bp, Homo sapiens
aagggtggggctgtaaggctgtccttggcttctgctctgagcagaacatcaggccatagctatgtcttctgtccccaccaagcccctggtgacagcatcaragagggcagcctctaccctggtgcatccccgttcacagcctctgccccaggcacaaggaaaagtccccagtgtctgggcaggcctgagcagggagggtct

SEQ ID NO: 19642 - DNA, 201 bp, Homo sapiens
tcttctcttcctcctcctctcctctgggtagccctgaagccactcctggaggggcccttggatctctgaaggaaggccaggtgggctacactgaataacamcctaactactacccctcaacctcacccccaccccaggaaaagtaagtctttttctaacgatccaccagattagggttacatttaacagtaactagaaagg

SEQ ID NO: 19643 - DNA, 201 bp, Homo sapiens
agtctcctttatgagcttatttccatacagccatagttttgttcctttgtaccttatatgcaaagggtgtatacaagaaccaaagtttgtcagaagtcatmtttgtggtgctgcgtatgatggccaggttacttttcctgcatttgggcactgagggtgttcttgttttttttgtttgtttgttttctttgttttgttttg

SEQ ID NO: 19644 - DNA, 201 bp, Homo sapiens
gtctggagtttgagaccagcctggccaacatggtgaaaccctgtttctactaaaaatacaaaaaaattagctggacgtggtggcaggcatggtgacaggcmccgtgtatgctgcacgcctgtaatcctagctagctgggaggctgaggcaggagaattgcttgaactgtggagagggaggtttcggtgagccaagatcgcg

SEQ ID NO: 19645 - DNA, 201 bp, Homo sapiens
aaggacatgagtcatactggattaaggcccattctaatgacttcattttaacttaattgcctttttaaaggccctgtctccaaataatcacaatccaaggmcctcggggttaggatttcagcatatgagttttaggggcagagggggcacaattcagtccgtaacactgtggacttgctggttttgaggcaccctcgtgag

SEQ ID NO: 19646 - DNA, 201 bp, Homo sapiens
gattggtctcctctgggacctctctccttggcttgcaggtgaccactctcttgctgtgtcttcacatggtggtcactcggtgcaggagtgcttggtgtctstgtcatctgtatcctaatcttcttataaggacatgagtcatactggattaaggcccattctaatgacttcattttaacttaattgcctttttaaaggccc

SEQ ID NO: 19647 - DNA, 201 bp, Homo sapiens
tcaagggaggcaggcctctggccagtccttgggggaacgtcctgtgggactctggatgactcgagttgccttgctggacctcagttttcccatctgtccargaaaggagttatactcccaagcttggagattgcttcagtgggacattaatgtctctggaccacaatcatggcctgtgagaatagcccatggccttgcctg

SEQ ID NO: 19648 - DNA, 201 bp, Homo sapiens
tctgtttccacactcacacccacactctgataagtagcagaggtgctgctgagacccagatcccagggtcccagggtctgggtcccagcaggatctctgckacttatcagagtgtctgccggttccaaaagacagtggagggaggggatgggggcgcacatctttctcagaaagtcattgttctttgctagatgggcagga

SEQ ID NO: 19649 - DNA, 201 bp, Homo sapiens
gtcctccaatacctatctaaccaattccctatattacattctttttgttaaaaataactggtatgatttcttttttattggtgtaaccctgattcatacamtggagaattggggtaaaggatggattttatccagataaactggctagaatgtacttcagagggggctgagccagaccaaggggcagagtgggagggtcgg

SEQ ID NO: 19650 - DNA, 201 bp, Homo sapiens
gtgcatgaaaagggcactggtgggctgggaagttcgtaggaggagcctctcacatgctgggtttggggaggaattctggaaagcagttagtcttagggacrggaaggatgtagctggtgggacgggcgccctcagctccatgaataaaaggagtgggtctgactctggttctcattcccctttaccatgcctggcacacat

SEQ ID NO: 19651 - DNA, 201 bp, Homo sapiens
gccccttcttgttctagcagtgaagaggatcccatgtagactccaagcagctcaagttcagcaagggagacagaccattgcaagtgcatgaaaagggcacyggtgggctgggaagttcgtaggaggagcctctcacatgctgggtttggggaggaattctggaaagcagttagtcttagggacgggaaggatgtagctggt

SEQ ID NO: 19652 - DNA, 201 bp, Homo sapiens
tgtctattgtcacaggtggtgactgctggaggggctgagtccccaataagctgtgaatgtcttggaggacaagtatgttggccccttcttgttctagcagygaagaggatcccatgtagactccaagcagctcaagttcagcaagggagacagaccattgcaagtgcatgaaaagggcactggtgggctgggaagttcgta

SEQ ID NO: 19653 - DNA, 201 bp, Homo sapiens
gaggatgcggggggtgcagggggtggtctggttgcaagctccggaggcatagtgggtgacctgcctctggggggatcacatgaggtcatggaggtgttgtrgagccagcaacaggcactctggcccctgggtcctgatccaggccacctgctgccctgtgtgttcccaggccaggctgggtgtgcacatggctgtgctcct

SEQ ID NO: 19654 - DNA, 201 bp, Homo sapiens
aggctgctgtgggtggtgctcaggctctcagctgcctcacggggtcccgtgcctatgaggtaggctgaggatgcggggggtgcagggggtggtctggttgyaagctccggaggcatagtgggtgacctgcctctggggggatcacatgaggtcatggaggtgttgtggagccagcaacaggcactctggcccctgggtcct

SEQ ID NO: 19655 - DNA, 201 bp, Homo sapiens
ggactgtttctccatcagcgactgcccggtgtggatggactccagcaccacagcccagtgccgccagctggaggctgctgtgggtggtgctcaggctctcmgctgcctcacggggtcccgtgcctatgaggtaggctgaggatgcggggggtgcagggggtggtctggttgcaagctccggaggcatagtgggtgacctgc

SEQ ID NO: 19656 - DNA, 201 bp, Homo sapiens
gggcagtgtgaccgccagccctggggcagatctccaagtcagcggatggagcttaagcctgtgcctttgccctccttcccaggactgtttctccatcagcractgcccggtgtggatggactccagcaccacagcccagtgccgccagctggaggctgctgtgggtggtgctcaggctctcagctgcctcacggggtcccg

SEQ ID NO: 19657 - DNA, 201 bp, Homo sapiens
gcccagcaggcactgacaagcttatcaccagacctccggctacaccagcagcttcaggtaactgtggctacgtggtgtgagtgtgagaaacttctgcagartcccaagtcctgtgggtcctgaagcctgctcatctcagtgttgcagctgtgctcacgcgccctcaccagaagagctttcaacctcaggcttttggggaga

SEQ ID NO: 19658 - DNA, 201 bp, Homo sapiens
caacacggaagtatatactggaaggctggagcccagcaggcactgacaagcttatcaccagacctccggctacaccagcagcttcaggtaactgtggctaygtggtgtgagtgtgagaaacttctgcagagtcccaagtcctgtgggtcctgaagcctgctcatctcagtgttgcagctgtgctcacgcgccctcaccaga

SEQ ID NO: 19659 - DNA, 201 bp, Homo sapiens
ccaggagggtgatgagctctgtgactaagaagtggcaggggcaggtgtggagcccagttctttggcatgtggtctggggtctttctgtgtcttcaggaggstgtgacaccggtgtgtggtcatgtgaccatgtgcttgggtttcccaacagcaacacggaagtatatactggaaggctggagcccagcaggcactgacaag

SEQ ID NO: 19660 - DNA, 201 bp, Homo sapiens
aatggagaagtaaaatttgaggattggtggtttatgattccatttatttaaaatatttttagcatagttgacctttttatttgattgatgcctacttgttwaattaatgtactctagtgcttacaaatcccaagtcatgagtttcttcatcatctgcccagagtactctgctgtaatggcaggcacttgcgtttcaattct

SEQ ID NO: 19661 - DNA, 201 bp, Homo sapiens
aggatgggctgacggtcacttctccagtactaatgtgggtccaggtaagcgcagggattcctgttctccttctatccccaggctgtctcactggcagactyggtgatttgctaggaagtccaaaggtggcagccaatgagagcatctgttgacaccaggtcctcatgggaaagtggagttggcatgactcctgggatcagg

SEQ ID NO: 19662 - DNA, 201 bp, Homo sapiens
tcaacagttcccacttggggttggggaaggttctccttcatctggacatttccagagtcatccaccatagggtttctcctggctttgcaatggtctgcctkccctgaggctctggtctacattctctgttgttcttgcaggactcagggcggtgttcatgtgcacaaggatgggctgacggtcacttctccagtactaatg

SEQ ID NO: 19663 - DNA, 201 bp, Homo sapiens
gggggtgcgcttcgaaggaaagcgggctgcgtgggggcaccgtcgattgcacaggacgcggtcccggctcgcgtagccccgcaggcggcgccagagcgcargcccgcctcgtgactccggtccacagtccggccgggcggagctaggggcgggcccctgcgtctctgggcgctggagcgcggcgactatcacgccgcgtgg

SEQ ID NO: 19664 - DNA, 201 bp, Homo sapiens
cagtgagatccttcgtggtgtttttggttaacgtcttcacttgcaacatgcactaatgtgaagtgacctttcccttctaggtcttgcaggtggaacagatrtgcccttttcagaggttgtgaagttagctccaaatcccagactagctgctaccccaagcccgggagcttctcaggtgagagaccatcagaatttgtttgt

SEQ ID NO: 19665 - DNA, 201 bp, Homo sapiens
tagacactgccaactcggcctgtgtgggttctgcataccgagcttttcatggtaggttgatggagggagacagctatctctggaagtggccaggacatggrgtgggctgaggagggtggaaaggggagagtgaggtgtacccagtctttggggacattggagtcttggggacttcagcttcatttttctagctcccagcag

SEQ ID NO: 19666 - DNA, 201 bp, Homo sapiens
ccctctgaggaatggctcaccacagtagaacctctgtgtccttttcaggtgcttgcagatgtgtttgatgccccggtgtatgttatagacactgccaactyggcctgtgtgggttctgcataccgagcttttcatggtaggttgatggagggagacagctatctctggaagtggccaggacatggggtgggctgaggaggg

SEQ ID NO: 19667 - DNA, 201 bp, Homo sapiens
gcgttagtagtgggccttacaccatggcctctcccatatctgttatgtctaagagccagagactggataggaaggacagcctccattcccactcctgcagraatggggagctcttagctcacactccaggaagcagctctgttgccttacagctcacactgtgagtgggatctgtctcacatgcaggtgaattctatggct

SEQ ID NO: 19668 - DNA, 201 bp, Homo sapiens
ggcagcatgtgtcccggggtgggggctcagggccagctcactcgcaggggccagggctagtggggcaatatctactaaagttttcttacagggggacttgygcaggagggaggtggagcctgacctcagggatggggtgagaaagtgtcaattggcacttgtaggcaagcatagaatagcagacaggttgttcccgcttct

SEQ ID NO: 19669 - DNA, 201 bp, Homo sapiens
gttaaagagcccagctatgagtttcaaatctgggctgttgtttaaaaagatcacacacagacacacacatacacacacgaatggacaatgagagttccttmctctgtgcccaccttttcctggagacaggttgcagcattccctggggatgtggaggttcgagcactaattgaaggacaattcatggccaagaggattcac

SEQ ID NO: 19670 - DNA, 201 bp, Homo sapiens
aaactcatgggtccagtcagcaagcaccagctccctccctcagagctatgccctcttctgcagctttaaaaatggctccctcatgagagagaagatccgcracgagtctgtatcccgttcctggagcgatttctctaaggcactgcagtccacagagatgggcaacggtggaaacctgggtaggccagttggtggtgccca

SEQ ID NO: 19671 - DNA, 201 bp, Homo sapiens
gtcgtggtccagcctgacctgcagttcctctgcctgagtctcttcactgaaactcatgggtccagtcagcaagcaccagctccctccctcagagctatgcyctcttctgcagctttaaaaatggctccctcatgagagagaagatccgcaacgagtctgtatcccgttcctggagcgatttctctaaggcactgcagtcca

SEQ ID NO: 19672 - DNA, 201 bp, Homo sapiens
tttgtgaacaggagggacatgcccagtttgtgacaggaagtgatgtgactccaggctctgcaaaagattccttcaggtctggtgacctggagactgtagcrttttcgtggcctgaagggtgggtggctgtgctgggcaggcgggatttacctcaacagagcacctttgctttgtccccgtccctcagggagccatttcttc

SEQ ID NO: 19673 - DNA, 201 bp, Homo sapiens
tgcttccctgttccttggctcttactcccctattgactacagtgatggtgagcctcggggtatggggtgggtgcctgggcagtgtgcatgtggcatgtggstgtgcaagcagtgggagccccacctaccccgagtgggtgccaatcttgtagccctgtcatctgttgccaggaaggaagtgtattcattatcttttaccac

SEQ ID NO: 19674 - DNA, 201 bp, Homo sapiens
tgctctcccgaggagtctgctcatggtattccagctgctcctatctgagatgcacagtctccaccattacttgggccttttgttcaaagtttccacttccytctccaattttttttcatgctgtgtgtgtgtcagaagcattcagtagcgtagggtatgtggaagtgaggcacctctcactgtttctttcctttacagaga

SEQ ID NO: 19675 - DNA, 201 bp, Homo sapiens
tcacatacagaggttggttaaatgttcctgtttgattgaaagtcacagttgaattcttttcataatatgttagaatagatacatcttacgtgcagtgactraaaacgttgataagcagacattaacaaatgatatatttgatttgcttttttctcattgtcaggacatttccaaagaggagggaaagaatggaatgtggga

SEQ ID NO: 19676 - DNA, 201 bp, Homo sapiens
caaaaatttaccagcagaaccccgaggcctactcacatacagaggttggttaaatgttcctgtttgattgaaagtcacagttgaattcttttcataatatrttagaatagatacatcttacgtgcagtgactgaaaacgttgataagcagacattaacaaatgatatatttgatttgcttttttctcattgtcaggacatt

SEQ ID NO: 19677 - DNA, 201 bp, Homo sapiens
gttttacagggaaccaaattgcaaaaatttaccagcagaaccccgaggcctactcacatacagaggttggttaaatgttcctgtttgattgaaagtcacakttgaattcttttcataatatgttagaatagatacatcttacgtgcagtgactgaaaacgttgataagcagacattaacaaatgatatatttgatttgctt

SEQ ID NO: 19678 - DNA, 201 bp, Homo sapiens; identical to SEQ ID NO: 2649

SEQ ID NO: 19679 - DNA, 201 bp, Homo sapiens
gaatagctcaattcctccaacccttcctctaggacatggttttaagtctctgccctgtcatctgatctgcagcaatgacttgtttctcgtccagacacctyatctccttccctagcctcttctcttcctcctcctctcctctgggtagccctgaagccactcctggaggggcccttggatctctgaaggaaggccaggtgg

SEQ ID NO: 19680 - DNA, 201 bp, Homo sapiens
gtgtatgctgcacgcctgtaatcctagctagctgggaggctgaggcaggagaattgcttgaactgtggagagggaggtttcggtgagccaagatcgcgccmctgcactccagcctggacaacagagggagagcctgtctcaaaaaaaaaaaaaaaaaaaaaaaaaaaaggaagtctggaagtgtgttgtttaatctccaga

SEQ ID NO: 19681 - DNA, 201 bp, Homo sapiens
catctcccaacctcgtgatctgcctgcctcagcctcccaaagtgctgagattacaggcgtgagccaccacacctggccaagttgtcgctattattgccacrcacagatatttatgtcattgaatttcccagtctcttttattgcttctagattttgagtcatagttcaaaaggccttcctcactccaaaattatgaaggaa

SEQ ID NO: 19682 - DNA, 201 bp, Homo sapiens
acagaggttggttaaatgttcctgtttgattgaaagtcacagttgaattcttttcataatatgttagaatagatacatcttacgtgcagtgactgaaaacrttgataagcagacattaacaaatgatatatttgatttgcttttttctcattgtcaggacatttccaaagaggagggaaagaatggaatgtgggaaagaga

SEQ ID NO: 19683 - DNA, 201 bp, Homo sapiens
catacattttaaaaaagtcattggccaggcacggtgactcacgcctgtaatcccagcactttgggaggctgaggcaggtggatcacatgaggtcggagttygagaccagcctgaccaacatggtgaaaccccatctctactaaaaatacaaaattagagccatacgcagtggctcacgcttgtaatcccagcactttgaga

SEQ ID NO: 19684 - DNA, 201 bp, Homo sapiens
ttgccttgggagtttaggaagggtcatgaaggaaacttctggagtggtggaaatattctgttttgatctcagtgtttatatgggtatatacatacattttwaaaaagtcattggccaggcacggtgactcacgcctgtaatcccagcactttgggaggctgaggcaggtggatcacatgaggtcggagttcgagaccagcc

SEQ ID NO: 19685 - DNA, 201 bp, Homo sapiens
ttgctcttttttccctagtttcctcaagtggaaacttagaggattgatttaagaccttcttttctaatatatgcatttaatgctataaatttctctgtaarcacaaatgctttttatgggatgccttagcagcatcccatacattttgataagttatagtttcatttttttcgttcaaaatattttttagttctcttgaga

SEQ ID NO: 19686 - DNA, 201 bp, Homo sapiens
ggaggtctctaggttgaactgctcctagggtgtggggcctcatctggtgacgttagtaccccctggaccagtgtagaagctgaggaaaattctacacttcmttttttaaaatgcctttcaggtaaaggttgttgctgttgatgcagagttgaatgtcttctatgaggaaagtgtgcattttgacagagatcttccagaatt

SEQ ID NO: 19687 - DNA, 201 bp, Homo sapiens
gctgggaagttcgtaggaggagcctctcacatgctgggtttggggaggaattctggaaagcagttagtcttagggacgggaaggatgtagctggtgggacrggcgccctcagctccatgaataaaaggagtgggtctgactctggttctcattcccctttaccatgcctggcacacattagaccatcaataccaattgact

SEQ ID NO: 19688 - DNA, 201 bp, Homo sapiens
tcttgtggctaatttgttagtcctacaaaggcagtctagtcacaggcaagaaggagatttgttttgggaaagagctgttatcatctttgttttaaactatraagtaagttcctcccaaagttagttctgcctatgcccatgaataagcaatgacagcttggaggctagaagcaagatggaattggttaagtcagatctctt

SEQ ID NO: 19689 - DNA, 201 bp, Homo sapiens
gacaagggggccaacaggccaccctggggaggttaaatctcctgtgagcggtggcctatgctcagccaaggtcagctttcttgaggaggtagtgctgcaarccattagtagccagtactcacagcagctggggcaggatgcacaatggtccagtgagggggatctgggtcggcatcagtggcatctactacaatatctctg

SEQ ID NO: 19690 - DNA, 201 bp, Homo sapiens
cacggaagtatatactggaaggctggagcccagcaggcactgacaagcttatcaccagacctccggctacaccagcagcttcaggtaactgtggctacgtkgtgtgagtgtgagaaacttctgcagagtcccaagtcctgtgggtcctgaagcctgctcatctcagtgttgcagctgtgctcacgcgccctcaccagaaga

SEQ ID NO: 19691 - DNA, 201 bp, Homo sapiens
ttcagtcctccaatacctatctaaccaattccctatattacattctttttgttaaaaataactggtatgatttcttttttattggtgtaaccctgattcawacactggagaattggggtaaaggatggattttatccagataaactggctagaatgtacttcagagggggctgagccagaccaaggggcagagtgggaggg

SEQ ID NO: 19692 - DNA, 201 bp, Homo sapiens
ttctggacatttcgtagacatgaatatatataatatgtgacagccttcttttacttagcataatgttttctttttaaaaatttttcatagctttttgcttrtttcaaataccaacttgaaccagatacctggcataatgttttcaaagttcatccatgtcatagcgtgtgtcagtacttcattcctttttgtggttcagta

SEQ ID NO: 19693 - DNA, 201 bp, Homo sapiens
tgattctggacatttcgtagacatgaatatatataatatgtgacagccttcttttacttagcataatgttttctttttaaaaatttttcatagctttttgyttgtttcaaataccaacttgaaccagatacctggcataatgttttcaaagttcatccatgtcatagcgtgtgtcagtacttcattcctttttgtggttca

SEQ ID NO: 19694 - DNA, 201 bp, Homo sapiens
ttaaaatgcctttcaggtaaaggttgttgctgttgatgcagagttgaatgtcttctatgaggaaagtgtgcattttgacagagatcttccagaatttgggyatgtacttgatgtgcatgtgtgtgtgatgggggtgttggttttggggtcctcccgcaaacttttgtattcgcagaccgcactgttgaggctttgccaaat

SEQ ID NO: 19695 - DNA, 201 bp, Homo sapiens
aggcccagggcctccagaaggacaggcaggctccctctgaaagacaagcctgcttatagctgaaacctctggcccaggcgtcctctaagggaagccaggckgtgtcagggcacggcccatgaagacataagatgaagatggggagaaccagagggggtgcgcttcgaaggaaagcgggctgcgtgggggcaccgtcgattg

SEQ ID NO: 19696 - DNA, 201 bp, Homo sapiens
ccatgggtggacagctgctccagtgccaagatacagccacagaggactgcaggcccagggcctccagaaggacaggcaggctccctctgaaagacaagcckgcttatagctgaaacctctggcccaggcgtcctctaagggaagccaggctgtgtcagggcacggcccatgaagacataagatgaagatggggagaaccag

SEQ ID NO: 19697 - DNA, 201 bp, Homo sapiens
gactcagtgcttccaaccccagggcccatttccctgtggcccctgagtcaccaccatgggtggacagctgctccagtgccaagatacagccacagaggackgcaggcccagggcctccagaaggacaggcaggctccctctgaaagacaagcctgcttatagctgaaacctctggcccaggcgtcctctaagggaagccag

SEQ ID NO: 19698 - DNA, 201 bp, Homo sapiens
gaaaaccccaaaatcttataatattttaagaaagtttactgatttgtgttgagctgcattcaaagccatcctgggccacatgcagcccatgcgctgcaggytggacaagctcggtctagtgaattccaccattacacctctctcatgatctctttctgtgtctttgatagccttcacagctccctatgtgggttcatctgt

SEQ ID NO: 19699 - DNA, 201 bp, Homo sapiens
aggtgacattgcggtaaggcgacttcccacacccataggctctttctgtttccacactcacacccacactctgataagtagcagaggtgctgctgagaccsagatcccagggtcccagggtctgggtcccagcaggatctctgctacttatcagagtgtctgccggttccaaaagacagtggagggaggggatgggggcgc

SEQ ID NO: 19700 - DNA, 201 bp, Homo sapiens
tccaaagtgggctgtcagctgagggctctctgccaacagcactcccatcagttgggagaataagttcttcattcccgaggtgaatctggatggcacaccayagcatccgccacaccactgcacctatttacagaagggtctggcagcccagcagcaggggtgggtgcatcttgtaaggaactgtgaagggtctgagattta

SEQ ID NO: 19701 - DNA, 201 bp, Homo sapiens
ctgcctccctttaacttgctaattgtgaggcttaaaaagaatccttgaccaaaatggctttataatctaataggaaatctgggggtagaattggttcagtrgttcaacatgagaactctggtcatgttccctgcaattccttaggtcagcagtggacaatgggaacataatgtgagccacatatgtcatttaaaatattcg

SEQ ID NO: 19702 - DNA, 201 bp, Homo sapiens
tgaggcttaaaaagaatccttgaccaaaatggctttataatctaataggaaatctgggggtagaattggttcagtagttcaacatgagaactctggtcatsttccctgcaattccttaggtcagcagtggacaatgggaacataatgtgagccacatatgtcatttaaaatattcggttgcctcattttttaaagtaaaag

SEQ ID NO: 19703 - DNA, 201 bp, Homo sapiens
aaagtaaaagtaaaaataaaaataaatgattaaaattaattttaatacattttatttaatccactatatctgaaatattgtcatgtcaacgtgataaattwgaagttactaatgtggggccggatgcagtggctcacacctgtaatcccagcactttgggaagccaaggtgggcagattgcttgagcccaggagttcgaga

SEQ ID NO: 19704 - DNA, 201 bp, Homo sapiens
tgctcatcagggagaaaaatactggcctatccctcccctatcccacacacgcccaacaggctaccacttggtcatatggtcaattctggttgtaggaaagkctagggtagggtctggctctttcattctatctagaaggaggccagcaaggaggaagataattggggaaagttttagggcagcacagcagcgtctgcctca

SEQ ID NO: 19705 - DNA, 201 bp, Homo sapiens
taccacttggtcatatggtcaattctggttgtaggaaaggctagggtagggtctggctctttcattctatctagaaggaggccagcaaggaggaagataaytggggaaagttttagggcagcacagcagcgtctgcctcatctagagtacggagtggccaatcctctgagctgtatgtgcctcatcactctccctggcctg

SEQ ID NO: 19706 - DNA, 201 bp, Homo sapiens
gcaccaagagtaggccccagttgcataatcagttgttaaaatacttggcttccagctgggcgtggtgactcactcctgtaatcccagcactttcggaggcygaggcggatggatcacatgaggtcaggagttagagaccagcctggccaacatggtgaaaccccatctctactaaaaaagaaaaaaacacaaaaattagct

SEQ ID NO: 19707 - DNA, 201 bp, Homo sapiens
tgagaggttcaggcacgagaatcacttgaaaccaggaggtggaagcttcagttaatcaagattgcaccactgcacctccagcctgggtaacagagtgagamcctgtctcaaaaaataaaaaaacaaaacttaactttggagcaaattaaaccaaattaagaaggaatggggttggcatgagctcctacttgtgtttacttg

SEQ ID NO: 19708 - DNA, 201 bp, Homo sapiens; identical to SEQ ID NO: 2677

SEQ ID NO: 19709 - DNA, 201 bp, Homo sapiens; identical to SEQ ID NO: 2678

SEQ ID NO: 19710 - DNA, 201 bp, Homo sapiens; identical to SEQ ID NO: 2679

SEQ ID NO: 19711 - DNA, 201 bp, Homo sapiens; identical to SEQ ID NO: 2680

SEQ ID NO: 19712 - DNA, 201 bp, Homo sapiens; identical to SEQ ID NO: 2681

SEQ ID NO: 19713 - DNA, 201 bp, Homo sapiens
aatattaaaactcaaataaaccccaaagaacttttggaaaacaaaagaaaaccttaaactttatcttgaaagggtctatcttgttacttagaatattgaaycagaatgattagctctgagacatagcctaccaactatactttgaagccaaagaaaaagaactatgtaagcctctaggccaaaagacctagtctcttacaa

SEQ ID NO: 19714 - DNA, 201 bp, Homo sapiens
actatactttgaagccaaagaaaaagaactatgtaagcctctaggccaaaagacctagtctcttacaaaggaaagacctggttggcctcaaacttctcaayaaagcaagatagcaatggggcaaccttttcaagaaactcaaagtatgaactgaggatttcatatttcaccaagctgtcctttaagtatcaaggatatagg

SEQ ID NO: 19715 - DNA, 201 bp, Homo sapiens
taacatttgcataacaaattatgcaaggaaaaatgaatagaaacctagaaataacagagaaatttaaaacacctctctctcatccaagactgaagttaagragacaaaaaatacatataacgatataagtgatctgagtaacagtatctataaagtagatctaatgaatatatgttgaactttctaccttgataatagaga

SEQ ID NO: 19716 - DNA, 201 bp, Homo sapiens
cacctggcatagcagtgattaaactcattgggagctatctcaaaaataattgtgagtgaggcttttggtacatagagtagactccaatcagacacataaarcccacagtacattttaggaagctatactaatggcattaacctggattaaaagggactaaatgttaaaagaccctggacccccaactttctatgggcaaca

SEQ ID NO: 19717 - DNA, 201 bp, Homo sapiens
agacacaattccaacatacaagacaacatatgtataaggttattgtgaaattattgataacagcgaagtacttgggaaaaggcacatatacattaatatasgacagattgaatagattataatgcatccacacaataaaaaagaatgaggaagatctctatgtaccaatgatgggtaaattccataaacaaaggacagttc

SEQ ID NO: 19718 - DNA, 201 bp, Homo sapiens
caagccctaaccctgtcataaacaggccttaaataaactggccataaacaggatttctgcagcaatgggacatgctcatgatggctgtcatgcacactgckaaaagttgttggtttactggagcagggcaaggaacacctggccccgcccggagcaaaaaactgctcaaaccacaaacgatagcaggaaaggcctgtgcct

SEQ ID NO: 19719 - DNA, 201 bp, Homo sapiens
aaacaggccttaaataaactggccataaacaggatttctgcagcaatgggacatgctcatgatggctgtcatgcacactgcgaaaagttgttggtttactrgagcagggcaaggaacacctggccccgcccggagcaaaaaactgctcaaaccacaaacgatagcaggaaaggcctgtgccttggcagcatgtttttgctg

SEQ ID NO: 19720 - DNA, 201 bp, Homo sapiens
ggtccatttttgggcttttgtttttgttccatggtttggtagatctgttcataagccagtaacacattgtttcaattatcccagctctgtaatatgtttgyttgtttgtttatttacttttgagttggagtctcgctctgtcgcccaggctggagtgcagtggcatgatctcggctcactgcaacctctgcctcctgggtt

SEQ ID NO: 19721 - DNA, 201 bp, Homo sapiens
atctttgttttgtttgtagttgtattagttatctattgccatgtaacaaattatctcaaaatttagcagcttaaaacagtaataaatgtttattctcttayacagtttctttgggtcaagaatttggtttcagcatggttgggtgattctgattgaggatatctcctgaggttgcagtcacaatgtcatctggggctgcag

SEQ ID NO: 19722 - DNA, 201 bp, Homo sapiens
ttcttgccatagtttactgagaatgatgatttccaatttcatccatgtccctacaaaggacatgaactcatcattttttatggctgcatagtattccatgktgtatatgtgccacattttcttaatccagtctatcattgttggacatttgggttggttccaagtctttgctattgtgaatagtgccgcaataaacatatg

SEQ ID NO: 19723 - DNA, 201 bp, Homo sapiens
tttctcaggtttgtcaaagatcagatagttgtagatatgcggcgttatttctgagcgctctgttctgttccattgatctatatctctgttttggtaccagyaccatgctgttttggttactgtagccttgtagtatagtttgaagtcaggtagtgtgatgcctccagctttgttcttttggcttaggattgacttggtgat

SEQ ID NO: 19724 - DNA, 201 bp, Homo sapiens
gtatatctagaaaaccccaaaatcttataatattttaagaaagtttactgatttgtgttgagctgcattcaaagccatcctgggccacatgcagcccatgsgctgcaggctggacaagctcggtctagtgaattccaccattacacctctctcatgatctctttctgtgtctttgatagccttcacagctccctatgtggg

SEQ ID NO: 19725 - DNA, 201 bp, Homo sapiens
tgtgtctttgatagccttcacagctccctatgtgggttcatctgtccactctgagccctttctgtgcaaactaacccactcttattgggagctgacatctkctgtcaaaagacaaaattacaacaaatttaaagatcctaaatggattttatctgtgattctagaattggacaacaccttattctgtacaaaagaaggagt

SEQ ID NO: 19726 - DNA, 201 bp, Homo sapiens
gtggactttaccctgtgaccgcccttcgttgacaccagcttgcctggtctgtgcacccaggactgctggccagaggagcagtgtgctgctgccaacgcccygcagacaggcaagcaaatcaaaatttgccttcaaagagggcatggggtgaccgggggcaccttttcctttaaagtacttgggaaatatacacagttgcag

SEQ ID NO: 19727 - DNA, 201 bp, Homo sapiens
ataggccatggtatagagtttgtctttattctaaaagctatggtcagccactaagggccataaggggtaggggtatgggtgaggtatgaatgacaggttgyatttttgttttgaaaatatctctctgggggcattgggagaacagattcggagcattgctggaatggacgtggggaactattaaagaggtttttgctggtc

SEQ ID NO: 19728 - DNA, 201 bp, Homo sapiens
cacgaggtcaggagatcgagaccatcctggctaatgcagtgaaaccccgtctctactaaaaatacaaaaatttagccaggcttggtgccgggcgcctgtartcccagctgctcgggaggctgaggcaggagaatggggtgaacctgggaggcagagtttgtagtgagccgagataatgccactgcactccagcctgggtga

SEQ ID NO: 19729 - DNA, 201 bp, Homo sapiens
gatcgagaccatcctggctaatgcagtgaaaccccgtctctactaaaaatacaaaaatttagccaggcttggtgccgggcgcctgtagtcccagctgctcrggaggctgaggcaggagaatggggtgaacctgggaggcagagtttgtagtgagccgagataatgccactgcactccagcctgggtgacagagcaagactc

SEQ ID NO: 19730 - DNA, 201 bp, Homo sapiens
ggctaatgcagtgaaaccccgtctctactaaaaatacaaaaatttagccaggcttggtgccgggcgcctgtagtcccagctgctcgggaggctgaggcagragaatggggtgaacctgggaggcagagtttgtagtgagccgagataatgccactgcactccagcctgggtgacagagcaagactctgtctcaaaaaaaaa

SEQ ID NO: 19731 - DNA, 201 bp, Homo sapiens
tttcatttctattgggtatattacctaaaagtggaattgcggggtcacatggtaactctgtgttcaacattttgaagaattgccaaactgttttccaaagkggctgtactattttccattcccaccagtggtagatggtgcctctagtttctctacatcctttttttttttttgagatggagtcttgctctgtcacccagg

SEQ ID NO: 19732 - DNA, 201 bp, Homo sapiens
ttcaggtgctctagaacaatttaaatagtattagaaatatttgctatttaaaggtttggtcccagcactttgggaggccgaggcgggtggatcatgaggtyaggagatcgagaccatcctggctaacaaggtgaaaccccgtctctactaaaaatacaaaaaattagctgggcgcggtggcgggcgcctgtagtcccagct

SEQ ID NO: 19733 - DNA, 201 bp, Homo sapiens
gaccatcctggctaacaaggtgaaaccccgtctctactaaaaatacaaaaaattagctgggcgcggtggcgggcgcctgtagtcccagctactcgggaggytgaggcaggagaatggcgtgaacccgggaagcggagcttgcagtgagccgagattgcgccactgcagtccgcagaccgacctgggcgacagagcaagact

SEQ ID NO: 19734 - DNA, 201 bp, Homo sapiens
tctcccaagtagctgggattacaggtgccctccaccatgcctggctaatttttgtatttttgtagagatggggtttcaccatattggccaggttggtcttkaactcccgacttcaggtgatctgcctgccttggcctcccaaagcactgggattataggtatgagccaccgtgcccagctgaaatgccagttttaagttgt

SEQ ID NO: 19735 - DNA, 201 bp, Homo sapiens
aacatctgcagtcaggccctgtggcctcccttgtaccatgaaatatacaaacatagactgggcatggtggctcatgcctgtaatcccagcactttgggagrccgaggcaggtggatcacctgaggtcaggagttcaagaccagcctggccaacatggtgaaaccttgtctctactaaaaatacaaaaaattagccgggcgt

SEQ ID NO: 19736 - DNA, 201 bp, Homo sapiens
ttgtaccatgaaatatacaaacatagactgggcatggtggctcatgcctgtaatcccagcactttgggagaccgaggcaggtggatcacctgaggtcaggrgttcaagaccagcctggccaacatggtgaaaccttgtctctactaaaaatacaaaaaattagccgggcgtggtggcccatgcttgtaatcccagctactc

SEQ ID NO: 19737 - DNA, 201 bp, Homo sapiens
accttgtctctactaaaaatacaaaaaattagccgggcgtggtggcccatgcttgtaatcccagctactcaggaggctgaggtaggagaatcacttgaacytgggaggtggaggttgcagtgagctgagaccgcaccattgcactccagcctggataacaagagtgaaactccatctcaaaaaaaaagaaaaaaaagaaat

SEQ ID NO: 19738 - DNA, 201 bp, Homo sapiens
gccgggcgtggtggcccatgcttgtaatcccagctactcaggaggctgaggtaggagaatcacttgaacctgggaggtggaggttgcagtgagctgagacygcaccattgcactccagcctggataacaagagtgaaactccatctcaaaaaaaaagaaaaaaaagaaatacaaacatagcccttagggtcttagtgctca

SEQ ID NO: 19739 - DNA, 201 bp, Homo sapiens
tcttgaactcctgagctcaagtgatcctcctgccttggcctccaaaagtgctgggattacaggtgtgaggtgatggcatgcacccgtagttccagccactygggaggctgagatggaaggatcacttgggcctgggaggttgaggctgcagtgagctgagattgcaccactccatttcagtctgggaaccagagcgagacc

SEQ ID NO: 19740 - DNA, 201 bp, Homo sapiens
tgaggtgatggcatgcacccgtagttccagccactcgggaggctgagatggaaggatcacttgggcctgggaggttgaggctgcagtgagctgagattgcrccactccatttcagtctgggaaccagagcgagaccctgtctcgaagaaaaaaaaatggagaagtaaaatttgaggattggtggtttatgattccatttat

SEQ ID NO: 19741 - DNA, 201 bp, Homo sapiens
actcacttctctatcctgtgggtgcagagccattgtttactgcctgagtatttgattactaaggacattttaaggattcaaaggccaagatcacattgttwagtagatatcaaacagatttaatgcttatttttaaaatatttaattattagaaacgaggtctcactgtgttgcccaggctggactcctgggctccagagc

SEQ ID NO: 19742 - DNA, 201 bp, Homo sapiens
accagtaccatcatgctcagttgtggtaggtctcctttctggtgatgtggctcatttaagagctggcagctaccagggaagcactgtagcgcacacacacrcacacacacacacacacacacacacacacactctgcacacacccttatttgttcactcacccacaggcatacacatgcagggtcttcagtttagcctaag

SEQ ID NO: 19743 - DNA, 201 bp, Homo sapiens
cagtaccatcatgctcagttgtggtaggtctcctttctggtgatgtggctcatttaagagctggcagctaccagggaagcactgtagcgcacacacacacrcacacacacacacacacacacacacacactctgcacacacccttatttgttcactcacccacaggcatacacatgcagggtcttcagtttagcctaagat

SEQ ID NO: 19744 - DNA, 201 bp, Homo sapiens
cgttgggagtctcagccacagaagcacttttgttttcttttcagagacagagtctcaccttgtcacccaagttggagtgcagtggcatgatcatagctackgcagccaccaactcctgggctcaagtgatcctcctgcctcagcttcctgagtagctgggaccataggcttgctccaccatgcacagctaatttttttttt

SEQ ID NO: 19745 - DNA, 201 bp, Homo sapiens
tagctgggaccataggcttgctccaccatgcacagctaattttttttttttttgagacagagtctcgcttttgtcacccaggctggagtgcagtggcgcartctcggctcactgcaagctccgcctcctgggttcacgccattctcctgcctcagcctcccgagtagctgggactataggtgcccgccaccacgcctggct

SEQ ID NO: 19746 - DNA, 201 bp, Homo sapiens
ctcctgggttcacgccattctcctgcctcagcctcccgagtagctgggactataggtgcccgccaccacgcctggctaatttttttatatttttagtagaracggggtttcaccgtgttagccaggatggtctcgatctcctgacctcgtgatctgcccgcctcggccttccaaagtgctgggattacaggcgtgagccac

SEQ ID NO: 19747 - DNA, 201 bp, Homo sapiens
ctcctgcctcagcctcccgagtagctgggactataggtgcccgccaccacgcctggctaatttttttatatttttagtagagacggggtttcaccgtgttwgccaggatggtctcgatctcctgacctcgtgatctgcccgcctcggccttccaaagtgctgggattacaggcgtgagccaccgcacccggcctaattttt

SEQ ID NO: 19748 - DNA, 201 bp, Homo sapiens
gcctcagcctcccgagtagctgggactataggtgcccgccaccacgcctggctaatttttttatatttttagtagagacggggtttcaccgtgttagccargatggtctcgatctcctgacctcgtgatctgcccgcctcggccttccaaagtgctgggattacaggcgtgagccaccgcacccggcctaattttttttta

SEQ ID NO: 19749 - DNA, 201 bp, Homo sapiens
tgaaagagctgctgagcccaggaggtactaacgtttattgagcccatttggtgccaggcattgtgctcatggttttctataccttcctcatttacttttcttttttttttttttttaattttttgagatggagtctcactctgttgcccaggcttgagtgcagcgggacgatctcggctcactgcaacccccacctcgtgg

SEQ ID NO: 19750 - DNA, 201 bp, Homo sapiens
tctataccttcctcatttacttttcttttttttttttttttaattttttgagatggagtctcactctgttgcccaggcttgagtgcagcgggacgatctcrgctcactgcaacccccacctcgtgggttcaaacgatcctcctgcctcagcctcctgagtagctgggattatagatgcaagccaccacacctggctaattt

SEQ ID NO: 19751 - DNA, 201 bp, Homo sapiens
ctccaacctccacctgctgggctcaagcgcttctcctgcctcagcctcctgagttgctgggactacaggcaagcgccaccacatctggctaattttttgtrtttttagtagagatggggtttcaccatgttaggcaggctggtcttgaactcctgacctcaggtgatccgcctgcctcagcctcccaaagtgctgggatta

SEQ ID NO: 19752 - DNA, 201 bp, Homo sapiens
ttcacatgcagttgttaaataaatagctaatgtttacctgcagaaaaggcttgcccttctatcaggaagtgcgggtgaggtggtggtttttttttgttttkttttttttttttttttacttttatcatttaatttttatttttaaaaatgtatatagtaaaaaagctgggttgcggagatgtcggtcagtggattaaaaat

SEQ ID NO: 19753 - DNA, 201 bp, Homo sapiens
tcacatgcagttgttaaataaatagctaatgtttacctgcagaaaaggcttgcccttctatcaggaagtgcgggtgaggtggtggtttttttttgttttgttttttttttttttttacttttatcatttaatttttatttttaaaaatgtatatagtaaaaaagctgggttgcggagatgtcggtcagtggattaaaaatt

SEQ ID NO: 19754 - DNA, 201 bp, Homo sapiens
tgaaatatgtactttattcttttaattagggcttaaaatgttaaaatatttctaaagaggactattttgggactctacagtgtacctctttaatgagaacrcccacagtttaggcctattaaggcataattcctttattttactaaagaattaaaataataaagatttgataattttctttcttttttttttttattgatc

SEQ ID NO: 19755 - DNA, 201 bp, Homo sapiens
ggtctctggttttcctaggcagaggaccctgcggccttccgcagtgtttgtgtccctgggtacttgagattagggagtggtgatgactcttaacgagcatkctgccttcaagcatctgtttaacaaagcacatcttgcaccgcccttaatccatttaaccctgagtggacacagcacatgtttcagagagcacagggttgg

SEQ ID NO: 19756 - DNA, 201 bp, Homo sapiens
gctgttgggtacacctcccagatggggtggtggccgggcagaggggctcctcacttcccagaaggggcggccgggcagaggcaccccccacctccctcccrgacggggcggctggccgggtttttttttgtttaatcaggggttggatcagtactagttagttttagttcaccagtagttgcagtgtcttgggatcaggat

SEQ ID NO: 19757 - DNA, 201 bp, Homo sapiens
gtatgagccactgtgcccagcctattatatttttttggagacaaagtctggctttgtcaggcaggaatacacccaggctggagtacagtggtgtgatcacrgctcattgcagccttgaattcctgggctcaagcaatcctcccacttcaacctcccgagtagctgggaccacaggcatgcatcaccgtttccagctaattt

SEQ ID NO: 19758 - DNA, 201 bp, Homo sapiens
acccaggaggcggaggttgcagtgagccaagatcaccccattgcactccagcctgggagacagagcgagacttcatctcaaaaacaacaacaacaacaacmacaacaaaaagaagaaatagaacactagaaccttggagtcttgctgtgctcctcttccactgtatcctcatcttcccctcatccctgcagagatcatttc

SEQ ID NO: 19759 - DNA, 201 bp, Homo sapiens
agctgttaattttcattgtactgtgatattccatcacatgattatacaaccatttatccatttgctatggcctgactgtgtctccccaaattcacatgttaaaaacttaatccccaatgtgacagtgttgggagatgggcctgatggaaggtgtttaggtcatgagggctcttgtgtattaatgccactataaaagtgctt

SEQ ID NO: 19760 - DNA, 201 bp, Homo sapiens
actaggattacaggcatgaatcctagtgctaggattaccgcacccaggctgtatggtagttttgttggaatatacaacctaaataaatattttaagagagaaattcaataggtgatggttttgaggcctgacatgtccaacaaggcctttgtttcatcctcccaaatactggctgggtaaaagactctatgttcaaaatac

SEQ ID NO: 19761 - DNA, 201 bp, Homo sapiens
gaagctgagatgacctttagagttttacccagttggtctaaggggctgggcctttataccccatgtcaatcagtcatcacatgtgggccaccccaggatgsggtgaggcagctctttatagctaaagcagtctccaaagtgggctgtcagctgagggctctctgccaacagcactcccatcagttgggagaataagttctt

SEQ ID NO: 19762 - DNA, 201 bp, Homo sapiens
aggctgaggtgggaggattacttgagcccagaaggtggaggttgcagtaagccaagatcacaccactgcactccagcctgggcgacagagaccctgtctcaaaaaaaaaaaaaaaaaagttactaatatgatattttacatttccttttttgcatgaagcttttgaaatttggtgtgcatttaacacttatagttctgggc

SEQ ID NO: 19763 - DNA, 201 bp, Homo sapiens
atctctttaaaaaaaaaaaaaaaaaaaaaaagctggcagccaagatggccaaataggaacagctccggtctacagctcccagcatgagcaacgcagaagaygggtgatttctgcattttccatctgaggtactgggttcatctcactagggagtgccagacagtgggcacaggacagtgggtgcagcgcaccgtgcgcaag

SEQ ID NO: 19764 - DNA, 201 bp, Homo sapiens
agcaacgcagaagatgggtgatttctgcattttccatctgaggtactgggttcatctcactagggagtgccagacagtgggcacaggacagtgggtgcagygcaccgtgcgcaagccgaagcagggcgaggcattgcctcactcgagaagtgcaaggggtcagggagttccctttcctagtcaaagaaaggggtgacagat

SEQ ID NO: 19765 - DNA, 201 bp, Homo sapiens
ggtgacagatggcacctggaaaatcgggtcactctcaccctaatactgcgcttttccgacaggcttaaaaaacggcgcaccaggagattatatcccgcacmtggctcagagggtcctacgcccacggagtcttgctgattgctagcacagcagtctgagatcaaactgcaaggcggcagccaggctgggggaggggcgcct

SEQ ID NO: 19766 - DNA, 201 bp, Homo sapiens
gcagtgttaaatatccctgtctgacagctttgaagagagcagtggttctcccagcacacctctggagatctgagaatgggcagactgcctcctcaagtggktccctgacccctgacccccgagcagcctacctgggaggcaccccccagtaggggcagattgacagcccacacggccgggtactcctctgagacaaaactt

SEQ ID NO: 19767 - DNA, 201 bp, Homo sapiens
agatgaatgtataactagaataaccaatacagagaagtgcttaaaggagctgatggagctgaaagccaaggctcgagaactatgtgaagaatgcagaagcytcaggagccgatgcgatcagctggaagaaagggtatcagtgatggaagatgaaatgaatgaaatgaagtgagaagggaagtttagagaaaaaagaataaa

SEQ ID NO: 19768 - DNA, 201 bp, Homo sapiens
agtctctgataaaacagactttaaaccaacaaagatcaaaagagacaaagaaggccattacataatggtaaagggatcagttcaacaagaagagctaactrtcctaaatatatatgcacccaatacaggagcacccagattcataaagcaagtcctgagtgacctacaaagagacttagactcccacacaataataatggg

SEQ ID NO: 19769 - DNA, 201 bp, Homo sapiens
aatcaacagaatatacatttttttcagcaccacaccacacctattccaaaattgaccacatacttggaagtaaagctctcctcagcaaacgtaaaagaacrgaaattataacaaactgtctctcagaccacagtgcaatcaaactagaactcaggattaagaaactcactcaaaaccgctcagctgcatggaaactgaaca

SEQ ID NO: 19770 - DNA, 201 bp, Homo sapiens
ctcctcagcaaacgtaaaagaacggaaattataacaaactgtctctcagaccacagtgcaatcaaactagaactcaggattaagaaactcactcaaaaccrctcagctgcatggaaactgaacaacctgctcctgaatgactactgggtacataacgaaatgaaggcagaaataaagatgttctttgaaaccaacaagaac

SEQ ID NO: 19771 - DNA, 201 bp, Homo sapiens
gaaactattccaatcaatagaaaaagagggaatcctccctaactcattttataaggccagcagcatcctgataccaaagccgggcagagacagaaacaaaraagagaattttagaccaatatccttgatgagcattgatgcaaaaaccctcaataaaatactggcaaaccaaatccagcagcacatccaaaagcttatcca

SEQ ID NO: 19772 - DNA, 201 bp, Homo sapiens
acccacagccaatatcatactgaatgggcaaaaactagaagcattccccttgaaaactggcacaagacagggatgccctctctcaccactcctattcaacrtagtgttggaagttctggccagggcaattaggcaggagaaggaaataaagggtactcagttaggaaaagaggaagtcaaattgtccctgtttgcagatga

SEQ ID NO: 19773 - DNA, 201 bp, Homo sapiens
aatcaatatcacgaaaatggccatactgcccaaggtaatttatagattcaatgccatccccatcaagctaccaatgactttcttcacagaattggaaaatrctactttaaagttcatatggaaccaaaaaagagcccgcatcgccaagtcaatcctaagccaaaagaacaaagctggaggcatcatgctacctgacttcaa

SEQ ID NO: 19774 - DNA, 201 bp, Homo sapiens
ccttatacaaaaatcaattcaagatggattaaagacttaaatgttagacctaaaaccataaaaaccctagaggaaaacctaggcattaccattcaggacakaggcatgggcaaggacttcatgtctaaaacaccaaaagcaatggcaacagaagccaaaattgacaaatgggatctaattaaactaaagagcttctgcaca

SEQ ID NO: 19775 - DNA, 201 bp, Homo sapiens
ctcaaacaaatttacaagaaaaaaacaaccccatcaaaaagtgggtgaaggacatgaacagacacttctcaaaagaagacatttatgcagccaaaagacayatgaaaaaatgctcatcatcactggccatcagagaaatgcaaatcaaaaccacaatgagataccatctcacaccagttagaatggcaatcattaaaaagt

SEQ ID NO: 19776 - DNA, 201 bp, Homo sapiens
agaaaaaaacaaccccatcaaaaagtgggtgaaggacatgaacagacacttctcaaaagaagacatttatgcagccaaaagacatatgaaaaaatgctcaycatcactggccatcagagaaatgcaaatcaaaaccacaatgagataccatctcacaccagttagaatggcaatcattaaaaagtcaggaaacaacaggtg

SEQ ID NO: 19777 - DNA, 201 bp, Homo sapiens
aatgagataccatctcacaccagttagaatggcaatcattaaaaagtcaggaaacaacaggtgctggagaggatgtggagaaataggaacacttttacackgttggtgggactgtaaactagttcaaccattgtggaagtcagtgtggtgattcctcaaggatctagaactagaaataccatttgacccagccatcccatt

SEQ ID NO: 19778 - DNA, 201 bp, Homo sapiens
tggtcctgcctcctacctactaagttgttacaggagatacttttgtagggcatatgaggttttgaagccagggtcattcttttgtctgtatgatgtggatctcaactcttttttttttttttcttttttttgagacagagtcttgctctgtcacccaggctggagtgcagtggtgcaatcttggctcactgcaacccccgg

SEQ ID NO: 19779 - DNA, 201 bp, Homo sapiens
cctcctacctactaagttgttacaggagatacttttgtagggcatatgaggttttgaagccagggtcattcttttgtctgtatgatgtggatctcaactcttttttttttttttcttttttttgagacagagtcttgctctgtcacccaggctggagtgcagtggtgcaatcttggctcactgcaacccccggctcccagg

SEQ ID NO: 19780 - DNA, 201 bp, Homo sapiens
ttaaaaaatcttaaactgtaggtttgagaactgctagcatttcctcttttgtgaattgatgctttctttcgcccagaaaaaaagttaaattgcaagtaaacgggatttaaaaattttaaattgcaaagtgcaaccagatgtaagaggcattttccccctctgttctaaactgctttttctgcccttctaggtctacgaggc

SEQ ID NO: 19781 - DNA, 201 bp, Homo sapiens
aagtgaaaactcaatttacataaaaatatatggcccttcagattttgtacttctttttgtgtcagtgttaataatacgtatctttcaaagaatatcccccttttttttttggtagagatagggttttgccatgttgttggtagcaagccctaaccctgtcataaacaggccttaaataaactggccataaacaggatttct

SEQ ID NO: 19782 - DNA, 201 bp, Homo sapiens
accagcctgaccaacatggtgaaaccccatctctactaaaaatacaaaattagagccatacgcagtggctcacgcttgtaatcccagcactttgagaggaygaggcaggcggaacacctgaggtcgggagttcaagaccagcctaacaaacatggagaaacctcgtctctactaaaaatacaaaattagctgggcgtggtg

SEQ ID NO: 19783 - DNA, 201 bp, Homo sapiens
tattgttttggttcttgttaaacacaacagagattccctgggtgatcttgtccacttctctctcccgaatcccaggcctggacacccatctccctcctagstaatccccgacccccatggctggatatcccacagatgcctcaggcttagcatgtcccagactgagttctgtctcccttcagacctcctcctttctgggtt

SEQ ID NO: 19784 - DNA, 201 bp, Homo sapiens
gtggagggatgtttggaccccttcagggaagagacttcacagctcaaatcagcggccctgctaacagagacttcaccccgtgacccctatgaccttctcckcttagggcctcctgagcgctcagctcccctgctcctgcctccaccctagggtgtgggtgggggttggaggtgggggctctgcgcctgcctggagagccct

SEQ ID NO: 19785 - DNA, 201 bp, Homo sapiens
atgcctgccctggaaggccacatcttctgcaacccggttgactcccagcactacatggcactcctgtggtgagcttgggtgttggttggcaccattccctrggtgaggaggtgtgggcaggtctggcaccatcttgaggaccccaagtcattccactaagctctggaatgactccctccactttcccgggctctgctgggc

SEQ ID NO: 19786 - DNA, 201 bp, Homo sapiens
gcaggaggtgaaggggaagaaaggaccttcttcacatggtggcaagaaagagagagcatggacgcacaagagagcaagcagggaaaactgtcttataaaascatcagatctcgtgagaactctctatcatgagaacagcttgggggaaaccacccccatgatccagtcacctctcaccaggtctcgccctcaacacctggg

SEQ ID NO: 19787 - DNA, 201 bp, Homo sapiens
cactggtccctgatggatggagggtggtgttgcttcagtgtttgggcagtgcagacgatgttgagattcacattcggtctcgtctctttgttgttataggwtaagttctcaaaggtgggattcctagatccaaggcttctgacacacacactgctgattgaacctcagtggcagtgtttgagtgcacctgttcctcactcc

SEQ ID NO: 19788 - DNA, 201 bp, Homo sapiens
tcaaaatacttttcctgagaactgtgaagatactcttccataatcttctggccttcagggttgctgatgagaagtatggggtctgcttcataattcttttrtggaagtgggaaaggagtttccctttagggacttcactgccatcctgcactgtgttttgttttattctttttccctttctgtgcttgccaaagggtacct

SEQ ID NO: 19789 - DNA, 201 bp, Homo sapiens
tgtccaccccaccaccattccagtccctcatccattctgctctgagctgggattttctagcatttggttaggaaaactggtcctcacatcttcagagggcmcttcttcactcctggtggtggtggtgtttgtatatctgacgctactacctaccttccctagaaattgctcattgtttcttgcccaccaatggcaaccttc

SEQ ID NO: 19790 - DNA, 201 bp, Homo sapiens
aaaagaagggagagaggaagaggaaaatacaaagaactccttgttgcttaggcaatatgtagaagtcaaatagtattatttaaagttgacaaaccaagtayatgaagtgtaagtaaggaaaaagggagatttagagcattaaaggtgtactatactattaatagtatagaatacatagtataattactagaataaaaatgt

SEQ ID NO: 19791 - DNA, 201 bp, Homo sapiens
cagtgaaaccccgtctctactaaaaatacaaaaatttagccaggcttggtgccgggcgcctgtagtcccagctgctcgggaggctgaggcaggagaatggsgtgaacctgggaggcagagtttgtagtgagccgagataatgccactgcactccagcctgggtgacagagcaagactctgtctcaaaaaaaaaaaaagaaa

SEQ ID NO: 19792 - DNA, 201 bp, Homo sapiens
tgaccccaacacttagcagctgaagaccaccgtgtttattttctcacctagtgtctgagagtcaggaatgtgggggcagcttagcttggaggtactggttygggatctcccacaaggtggcagtcaagctggcagccggggctgcagtcatctgaagggttgactggggctggaggatccatttccagcatcatgcacatg

SEQ ID NO: 19793 - DNA, 201 bp, Homo sapiens
cagtggcatgatctcggctcactgcaacctctgcctcctgggttcaagtgattcttctgcctcagcctcctgagtaattgggattacaggcgcccgccacyggctaatttttgtatttttagtagagatgggtttttgccatgttggccaggttggtctctaactcctgacctcaggtgatccgcctgccttggcctcctg

SEQ ID NO: 19794 - DNA, 201 bp, Homo sapiens
ccagcagcacatcaaaaaccttatccaccatgatcaagtgggcttcatccctgggatgcaaggctggttcaatatatgcaaatcaattaatgtaatccagyatataaacagaaccaaagacaaaaaccacgtgattatctcaatagatgcagaaaaggcctttgacaaaattcaacaacccttcatgctaaaaactctcaa

SEQ ID NO: 19795 - DNA, 201 bp, Homo sapiens
ctgtatcaagccatagaaatgtgtttttccttaactaatataattttttccctcatatcctttttttaaagaaaatactggggccaggtgtggtcgctcaygcctgtaatcccagcactttgggattacagaggcgggcacatcacgaggtcaggagatcgagaccatcctggctaatgcagtgaaaccccgtctctacta

SEQ ID NO: 19796 - DNA, 201 bp, Homo sapiens
cagcactttgggattacagaggcgggcacatcacgaggtcaggagatcgagaccatcctggctaatgcagtgaaaccccgtctctactaaaaatacaaaamtttagccaggcttggtgccgggcgcctgtagtcccagctgctcgggaggctgaggcaggagaatggggtgaacctgggaggcagagtttgtagtgagccg

SEQ ID NO: 19797 - DNA, 201 bp, Homo sapiens
ttgatttctagtttaatttcattgtggtctgagaacataccctatatgacttctagtctttcaaaattttaaaatttcctctccctcactctctcttccayttaataagtcagtcctctccactggacatttaaaaaaaggtgtccataaccaaaatatggtattgcttttttccattatattttcaagatattttaaacc

SEQ ID NO: 19798 - DNA, 201 bp, Homo sapiens
cagagccttctagctaccgttaactgactgcagatgtatgagtgagcccagctgagccccatccaatgatagcaagtagaattgtgagcttaatggttttkagccactaagttttgaagtggtttgtgacaatgcagaaattacccaatgtagataattatttttaagtttatttctaacttttttatccttttactactg

SEQ ID NO: 19799 - DNA, 201 bp, Homo sapiens
caattttatatttacttcactaaaataattggaaaaattttccttcttttcaggtgctctagaacaatttaaatagtattagaaatatttgctatttaaargtttggtcccagcactttgggaggccgaggcgggtggatcatgaggttaggagatcgagaccatcctggctaacaaggtgaaaccccgtctctactaaaa

SEQ ID NO: 19800 - DNA, 201 bp, Homo sapiens
caataaatgtaatccaacatataaacagaaccaaagacaaaaaccacatgattatctcaatagatgcagaaaaggcctttgacaaaattcaacaatgcttyatgctaaaaactctcaataaattaggtattgatgggacatatctcaaaataataagagctatctatgacaaacccacagccaatatcatactgaatgggc

SEQ ID NO: 19801 - DNA, 201 bp, Homo sapiens
tcgggaaggatttagttggttcttgctcctcaaaattgacattgctgctggagagtcactggagagtcatcaccacattttgggttgtacctgagagatgwttctgaccccagtaaatggggggtttatgtaagacactctgtctggaaactgtaactgtcagagttggcgttggattcagtggcagatgatggcactaca

SEQ ID NO: 19802 - DNA, 201 bp, Homo sapiens
tccagctgggcgtggtgactcactcctgtaatcccagcactttcggaggctgaggcggatggatcacatgaggtcaggagttagagaccagcctggccaayatggtgaaaccccatctctactaaaaaagaaaaaaacacaaaaattagctgggtgtggtggtgcacacctgtagtcccagctacttgagaggttcaggca

SEQ ID NO: 19803 - DNA, 201 bp, Homo sapiens
tggaaatgccagttttgttttgtgtgtgtgtgtgtgtgtgtgtgtgtgtgtgtgtgtgtgtgtgtgtgtgtgtttttgagacagagccttgctctgttgcrcccaggctggagtgcagtggcaagatctcagctcattgcatcctccgcctcctgggttcaaacaattctcccaccttagtctcccaagtagctgggatta

SEQ ID NO: 19804 - DNA, 201 bp, Homo sapiens
gacaagctcggttgtggagactccaacgcaccagcactagaggaatgaagacaaagacccagaaataaagtgcagtgtgggaatcggctaaaagcctttasagctgagagccacaaacagagttttgcccacatatttattgacagtaagcctgtgataaacattgtttctaaagattatagattagctgaaagcattcct

SEQ ID NO: 19805 - DNA, 201 bp, Homo sapiens
gtttatggtattttgttatagcaacctgagcaaactaatacaacgtatacgtttttgtgtggacatatattttcatttctattgggtatattacctaaaaktggaattgcggggtcacatggtaactctgtgttcaacattttgaagaattgccaaactgttttccaaagtggctgtactattttccattcccaccagtgg

SEQ ID NO: 19806 - DNA, 201 bp, Homo sapiens
ggggtttcaccgtgttggccaagctggtctcgaacttctgacctcaaatgatccacctgcctcggcctcccaaagtgctgggattgcaagtgtgagccacygtgcctggccattgttcttggttttccaacgtggaatcacactagagcatcttccatagcttgaattatttccccaggaggatggcagtccttctctctt

SEQ ID NO: 19807 - DNA, 201 bp, Homo sapiens
tcatgggttatttagaagaatgtttttaggctgggtacagtggctcacacctgtaatcccagcactttgggaggctgaagcaggcagaacacttaaggtcyggagtttgagaccagcctggccaacatggtgaaaccctgtttctactaaaaatacaaaaaaattagctggacgtggtggcaggcatggtgacaggcaccg

SEQ ID NO: 19808 - DNA, 201 bp, Homo sapiens
cgaactcctgggctcaagcagtccacccacctctgcctcctaaagtgctgagattacaggcgtgaaccaccacacccagcctcaaccgggtttttagaagyccatctttacctttaagaggctgaggtgggcggattacctgaggtcaggagttcaagaccagcctggctaacatggtgaaaccctgtctgtactgaaaat

SEQ ID NO: 19809 - DNA, 201 bp, Homo sapiens
gtggagtgcttggtacacactcagggcatactgtctgggtttgatccctggctctgccatttacaggcagtgacctgggatacgtcatctggctttctggkgcccccgtattctcatctgtcatagggtcattgtgagtgtaagtacatagcacagtgcctcctattaatacgcagtaaacattattaaagcttgggcttc

SEQ ID NO: 19810 - DNA, 201 bp, Homo sapiens
tttctagatggagaggttgagactcagaggctcaggctaaataatctgcccagagtcaagcaaggtcatagatggtggagggggctcaaacccattcctctctggctctgaagctgctgttttctttctcctccacaatgtgacctttctcgggaaggatttagttggttcttgctcctcaaaattgacattgctgctgga

SEQ ID NO: 19811 - DNA, 201 bp, Homo sapiens
gtcatcaccacattttgggttgtacctgagagatgtttctgaccccagtaaatggggggtttatgtaagacactctgtctggaaactgtaactgtcagagytggcgttggattcagtggcagatgatggcactacatgttggattatgaatggaaagctttgtataaagtaggaagttcatctcaatcttctgatggagga

SEQ ID NO: 19812 - DNA, 201 bp, Homo sapiens
caggcaccggggacacaaaggagaacaaaacattggtggcccttgctccccagagcctgctgtctaggagggagagggacagtagacgactgaatgagcaygtacatgaatgcagcaggtgctaaggctaggtggcagaagaacagagtgccgcaaaggaaagcagctggtgggcgggttggagacttaccctgggtgggg

SEQ ID NO: 19813 - DNA, 201 bp, Homo sapiens
attggcacttgtaggcaagcatagaatagcagacaggttgttcccgcttctcagctgtgtccacaatagcctgaccttttggccaggacctgtaagacttsggaatggtctttctgaaaccctaagctccaagctgcagatgagctgtcctgagctctggactgcaaagacataggcagtgcaaggtctggggacatgaat

SEQ ID NO: 19814 - DNA, 201 bp, Homo sapiens
taaagcttcaacatgagttttggaggggacacatattcaaaccatagcaactggcatggagagggcagacccagggccgggggaggcaaaaggaggagaargggatttctgacaacttgagctgtagaataatcagcattaggatgtcagtgagttccccttacaggtggcgttggaatggtctaagggtctgtaaggagg

SEQ ID NO: 19815 - DNA, 201 bp, Homo sapiens
ttgatcctgtcagctgaggaggatatatcgcctcaggaccctgtaataattgcattaactgcacaaattgtacagcatgtgtgtttgagcaatgtgaagtrtgggcaccttgaaaaaagaacaggataacagcaattgttcagggaataagagagataaccttaaactctgactgctggtgagctgggcagaacagaacca

SEQ ID NO: 19816 - DNA, 201 bp, Homo sapiens
cgtagcctgtctcttatggttgaggctgcagagatgaaataaactccagtctcccatagtgctcccaggcttattaggaagaggaaattcccacctaatamattttggtcagactggttgatcccaaaaccctgtctcctgataagatgttaccaatgacaatggtgcccgaaacttcattagcaattttaatttcacctc

SEQ ID NO: 19817 - DNA, 201 bp, Homo sapiens
taaaggtctgcaaagacttccaagttccctgaaaatgagactgggtgagcagggcagggttggtgctggagttggtggagtgcctggcaggggtcctccgrctgtcagaagagaaccccagggaacggaacagcccagcatacagggagaagcagttagggcaaaaggcccccatgggctcaggaggagctgatgggattg

SEQ ID NO: 19818 - DNA, 201 bp, Homo sapiens
tacttatcctcttagcaagcttaaatgcagaatcagacctgtcttgccgctctgctgagtgatcacttaaatagacatacttggaaccaacagaggttgcrcgcacgtgaggactcattctccaggctgctgtgtggactggccagctctttcgttcttgcccagacatcatctcatttggctttaatagtgtctaagggc

SEQ ID NO: 19819 - DNA, 201 bp, Homo sapiens
atcctcttagcaagcttaaatgcagaatcagacctgtcttgccgctctgctgagtgatcacttaaatagacatacttggaaccaacagaggttgcacgcaygtgaggactcattctccaggctgctgtgtggactggccagctctttcgttcttgcccagacatcatctcatttggctttaatagtgtctaagggcaataa

SEQ ID NO: 19820 - DNA, 201 bp, Homo sapiens
taggtactgatatgattcccacttcacaaccgaggaaaccaaatcttgcagtggttaaataacttggtcagggctggcagagctgggatctgaaccaagcsagtctggctccagatgctggattctcaaccactggctgaacctgctttttttaaggaacaatcgccctcttgatgtttatagacaccatcagacatgata

SEQ ID NO: 19821 - DNA, 201 bp, Homo sapiens
gggcttaaaatgttaaaatatttctaaagaggactattttgggactctacagtgtacctctttaatgagaacacccacagtttaggcctattaaggcatamttcctttattttactaaagaattaaaataataaagatttgataattttctttcttttttttttttattgatcattcttgggtgtttctcgcagaggggga

SEQ ID NO: 19822 - DNA, 201 bp, Homo sapiens
gtcaggcaggaatacacccaggctggagtacagtggtgtgatcacggctcattgcagccttgaattcctgggctcaagcaatcctcccacttcaacctccygagtagctgggaccacaggcatgcatcaccgtttccagctaatttttgtattttttgtagggacagaatctttgttgtccaggttggtctcaaattcctg

SEQ ID NO: 19823 - DNA, 201 bp, Homo sapiens
catggcacctgacctgcactcctgtttctacttcatgggtttattggtcttgttcttggggcagaaaaactgttgtattattgtggctttgtagtatgtcwgtattagttggctagggctgccataagaatgtgccacagaatgggtggcttaagcaacagaaatttattttctcacagttctggaggctaaaagtctgcg

SEQ ID NO: 19824 - DNA, 201 bp, Homo sapiens
gggactcagggcagtgcagaggaagaaggataagtgaggatatggtcttgtctggagtctacttcagctccatcctggtggggaggtggggctctggaacrtgaattataccacagagctgattttaccttgggacaagggggccaacaggccaccctggggaggttaaatctcctgtgagcggtggcctatgctcagcca

SEQ ID NO: 19825 - DNA, 201 bp, Homo sapiens
tcccccaagttctttccatgtgaactcctcttagtacaggtcctccatttgaaatgtatgcaatttatttgtgaacctaaatgggaaacttcaccattatscccatgaaacatgctcttgttagcttgggtttgtttgggcttgttaatgttagtctaatacccagctgtctccagccctaggtcagtgccatttgctaaa

SEQ ID NO: 19826 - DNA, 201 bp, Homo sapiens
catttttctagctcccagcaggtgagaaccaacccatactctctgttcctttattctttgcttaaagtggagaaaaagaggctgggtcctaactgaatgakgtctggtcagagttaaggtcagcacagggacatgggaaaagaacacagggcatggttgagagcacgtgggcatgagtctggacagctagagggcaggaga

SEQ ID NO: 19827 - DNA, 201 bp, Homo sapiens
ggagatatcttctccccatctgggtctggggatgactgtcttgtgtagccagtctgcgagtatgagtggagatggaaccagagtcttttgattagtttctytgctgtccaccccaccaccattccagtccctcatccattctgctctgagctgggattttctagcatttggttaggaaaactggtcctcacatcttcagag

SEQ ID NO: 19828 - DNA, 201 bp, Homo sapiens; identical to SEQ ID NO: 2647

SEQ ID NO: 19829 - DNA, 201 bp, Homo sapiens
tctccaaaattcactgaagtcctaacccccaatgcgatggtattaggagatggggtctttgggaggtaattagatctagattaggtcaggagggtggggamctcatgatgagattattaaattttaagaagaggaaaagatgagagagctttccctctccccacatgcatacttggagataaggctgtatgtgagcctaca

SEQ ID NO: 19830 - DNA, 201 bp, Homo sapiens
gcttgctcttgctgttttgatgacctgccctctttactgctaagcctgagggagaggctcctaggcagcacttcaccctgtcaaaagccctacctcccagraaggttctagtgcaggagtgtccaatcttttcacttccctgggccacattgggccacacataaaatacaccaatgatagctgatgagctaaaataaaagt

SEQ ID NO: 19831 - DNA, 201 bp, Homo sapiens
ttaaagtagtattttccaattctgtgaagaaagtcattggtagcttgatggggatggcattgaatctataaattaccttggacagtatggccattttcacratattgattcttcctacccatgagcatggaatgttcttccatttgtttgtatcctcttttatttccttgagcagtggtttgtagttctccttgaagaggt

SEQ ID NO: 19832 - DNA, 201 bp, Homo sapiens
tgattttgtatcctgagactttgctgaagttgcttatcagcttaaggagattttgggctgagacaatactggcaaaccgaatccagcagcacatcaaaaascttatccaccatgatcaagtgggcttcatccctgggatgcaaggctggttcaatatatgcaaatcaattaatgtaatccagtatataaacagaaccaaag

SEQ ID NO: 19833 - DNA, 201 bp, Homo sapiens
tgaacactggcacaagacagggatgccctctctcaccactcctattcaacatagtgttggaagttctggccagggcaattaggcaggagaagggtattcarttaggaaaagaggaagtcaaattgtccctgtttgcagacgacatgattgtatatctagaaaaccccaaaatcttataatattttaagaaagtttactgat

SEQ ID NO: 19834 - DNA, 201 bp, Homo sapiens
ttagctgggcgtggtggcggatgcctgtaatctcagctactcgggaggctgaggcaggagaatcacttgaacccagaaggcagaggtttcaatgagctgaratcacgccattgcactccagcctgggcaacaagagtgaaactccgtttcaaaaaaaaaaaaaattagctgggtgcggtggtgtgcgcctgtaatcccagc

SEQ ID NO: 19835 - DNA, 201 bp, Homo sapiens
aaaaaaaaaattagctgggtgcggtggtgtgcgcctgtaatcccagctacatgggaggctgaggcagaagaatcagttgaaccagggaggtggaggttgcrgtgaccggagatcacgccactgcactccagcctgggtgacaggagtgaaactctgtcaaaaaaaaaaaaaagtcatcaagcagttaagattagattaaaa

SEQ ID NO: 19836 - DNA, 201 bp, Homo sapiens
catggtggagcacacctgtagtcccagtttttctggaggctgaagcggatcgcttgagcccaggaggtggagattgcagtgagctaagatggcgtcaccgstctccagcctgggcgacagaacgggaccctgtctcaaaaaaaaaaaaagaaaaaagtgaaatgcatagtgtacaagtggactttaccctgtgaccgccct

SEQ ID NO: 19837 - DNA, 201 bp, Homo sapiens
attttcccctgttgttttcttcaagttgtgctctaatttttattacttagtttcttctgcttgctttaggtttaaattgctcttttttccctagtttcctsaagtggaaacttagaggattgatttaagaccttcttttctaatatatgcatttaatgctataaatttctctgtaagcacaaatgctttttatgggatgcc

SEQ ID NO: 19838 - DNA, 201 bp, Homo sapiens
atgggatgccttagcagcatcccatacattttgataagttatagtttcatttttttcgttcaaaatattttttagttctcttgagacttctttgactcatrggttatttagaagaatgtttttaggctgggtacagtggctcacacctgtaatcccagcactttgggaggctgaagcaggcagaacacttaaggtctggag

SEQ ID NO: 19839 - DNA, 201 bp, Homo sapiens
gaggctgaagcaggcagaacacttaaggtctggagtttgagaccagcctggccaacatggtgaaaccctgtttctactaaaaatacaaaaaaattagctgracgtggtggcaggcatggtgacaggcaccgtgtatgctgcacgcctgtaatcctagctagctgggaggctgaggcaggagaattgcttgaactgtggaga

SEQ ID NO: 19840 - DNA, 201 bp, Homo sapiens
tgaaaccctgtttctactaaaaatacaaaaaaattagctggacgtggtggcaggcatggtgacaggcaccgtgtatgctgcacgcctgtaatcctagctasctgggaggctgaggcaggagaattgcttgaactgtggagagggaggtttcggtgagccaagatcgcgccactgcactccagcctggacaacagagggaga

SEQ ID NO: 19841 - DNA, 201 bp, Homo sapiens
gtgagccaagatcgcgccactgcactccagcctggacaacagagggagagcctgtctcaaaaaaaaaaaaaaaaaaaaaaaaaaaaggaagtctggaagtrtgttgtttaatctccagattttccagttttctgttattgatttctagtttaatttcattgtggtctgagaacataccctatatgacttctagtctttcaa

SEQ ID NO: 19842 - DNA, 201 bp, Homo sapiens
ttctgttattgatttctagtttaatttcattgtggtctgagaacataccctatatgacttctagtctttcaaaattttaaaatttcctctccctcactctytcttccatttaataagtcagtcctctccactggacatttaaaaaaaggtgtccataaccaaaatatggtattgcttttttccattatattttcaagatat

SEQ ID NO: 19843 - DNA, 201 bp, Homo sapiens
catctgtagagaagggacggagaggagagatgagctcacaggtgggattaagacttttcactgttatatggggtttcaccatgttagccaggatggtctcsatctcccaacctcgtgatctgcctgcctcagcctcccaaagtgctgagattacaggcgtgagccaccacacctggccaagttgtcgctattattgccaca

SEQ ID NO: 19844 - DNA, 201 bp, Homo sapiens
tttttgtattttttttgtagagatggggtctcactctgttgcccaggctggtctcgaactcctgggctcaagcagtccacccacctctgcctcctaaagtkctgagattacaggcgtgaaccaccacacccagcctcaaccgggtttttagaagtccatctttacctttaagaggctgaggtgggcggattacctgaggtc

SEQ ID NO: 19845 - DNA, 201 bp, Homo sapiens
gctacttgggaggctgaggcaggagaatcacctgaacctgggaggcagaggttgcagtgagctgagattgtgccactgcattccagcctgggtgacaaagygagactccatataaaaaaaaaaaaaaaaaaagaagtccatctttacctccatgatttgagatgtgagccttatcatgtgctactttctgtgttcacttag

SEQ ID NO: 19846 - DNA, 201 bp, Homo sapiens
ttgggaggctgaggcaggagaatcacctgaacctgggaggcagaggttgcagtgagctgagattgtgccactgcattccagcctgggtgacaaagtgagaytccatataaaaaaaaaaaaaaaaaaagaagtccatctttacctccatgatttgagatgtgagccttatcatgtgctactttctgtgttcacttaggtcca

SEQ ID NO: 19847 - DNA, 201 bp, Homo sapiens
tgtgccactgcattccagcctgggtgacaaagtgagactccatataaaaaaaaaaaaaaaaaaagaagtccatctttacctccatgatttgagatgtgagscttatcatgtgctactttctgtgttcacttaggtccatttttgggcttttgtttttgttccatggtttggtagatctgttcataagccagtaacacattg

SEQ ID NO: 19848 - DNA, 201 bp, Homo sapiens
aggagatcgagaccatcctggctaatgcagtgaaaccccgtctctactaaaaatacaaaaatttagccaggcttggtgccgggcgcctgtagtcccagctrctcgggaggctgaggcaggagaatggggtgaacctgggaggcagagtttgtagtgagccgagataatgccactgcactccagcctgggtgacagagcaag

SEQ ID NO: 19849 - DNA, 201 bp, Homo sapiens
gtggaattgcggggtcacatggtaactctgtgttcaacattttgaagaattgccaaactgttttccaaagtggctgtactattttccattcccaccagtgrtagatggtgcctctagtttctctacatcctttttttttttttgagatggagtcttgctctgtcacccaggctggagtgcagtggcgtgatctcggctcac

SEQ ID NO: 19850 - DNA, 201 bp, Homo sapiens
tcccaggagggtgatgagctctgtgactaagaagtggcaggggcaggtgtggagcccagttctttggcatgtggtctggggtctttctgtgtcttcaggargctgtgacaccggtgtgtggtcatgtgaccatgtgcttgggtttcccaacagcaacacggaagtatatactggaaggctggagcccagcaggcactgaca

SEQ ID NO: 19851 - DNA, 201 bp, Homo sapiens
aaacttctgcagagtcccaagtcctgtgggtcctgaagcctgctcatctcagtgttgcagctgtgctcacgcgccctcaccagaagagctttcaacctcargcttttggggagagaccccactgggccagttctaagttacagcacaaagggctggcccatgtgtctccaaccaaggtcacctgggaagaagcgtcatgac

SEQ ID NO: 19852 - DNA, 201 bp, Homo sapiens
cctgggttcacgccattctcctgcctcagcctcccgagtagctgggactataggtgcccgccaccacgcctggctaatttttttatatttttagtagagayggggtttcaccgtgttagccaggatggtctcgatctcctgacctcgtgatctgcccgcctcggccttccaaagtgctgggattacaggcgtgagccaccg

SEQ ID NO: 19853 - DNA, 201 bp, Homo sapiens
tgcctgtctttactttaatctcttgatcctgtcagctgaggaggatatatcgcctcaggaccctgtaataattgcattaactgcacaaattgtacagcatrtgtgtttgagcaatgtgaagtatgggcaccttgaaaaaagaacaggataacagcaattgttcagggaataagagagataaccttaaactctgactgctgg

SEQ ID NO: 19854 - DNA, 201 bp, Homo sapiens
tactttaatctcttgatcctgtcagctgaggaggatatatcgcctcaggaccctgtaataattgcattaactgcacaaattgtacagcatgtgtgtttgarcaatgtgaagtatgggcaccttgaaaaaagaacaggataacagcaattgttcagggaataagagagataaccttaaactctgactgctggtgagctgggc

SEQ ID NO: 19855 - DNA, 201 bp, Homo sapiens
gggtgttcttgttttttttgtttgtttgttttctttgttttgttttgttttgtttttctggagacagggtttcactcctgttgcccagactggagtgcagwggtgtgatcttggctcactacaacctccgcctcccgggttcaagtgatcctcctgcctcagtctcctaagtaactgggactacaggtgcacaccaccacg

SEQ ID NO: 19856 - DNA, 201 bp, Homo sapiens
taattgtagattcacatgcagttgttaaataaatagctaatgtttacctgcagaaaaggcttgcccttctatcaggaagtgcgggtgaggtggtggttttkttttgttttgttttttttttttttttacttttatcatttaatttttatttttaaaaatgtatatagtaaaaaagctgggttgcggagatgtcggtcagtg

SEQ ID NO: 19857 - DNA, 201 bp, Homo sapiens
agattcacatgcagttgttaaataaatagctaatgtttacctgcagaaaaggcttgcccttctatcaggaagtgcgggtgaggtggtggtttttttttgtkttgttttttttttttttttacttttatcatttaatttttatttttaaaaatgtatatagtaaaaaagctgggttgcggagatgtcggtcagtggattaaa

SEQ ID NO: 19858 - DNA, 201 bp, Homo sapiens
aattagctcaatttagtcattccacaatatatacatatttcaaaacatgttgtataggataaatatgtgcaatttttattgtcaatttaaataagtaacaraataagtaaaaaaaagtctagaagcctatataacagcatactaacagtgtaactctggtgtaactagggttggtttttactttcttcattttgtcttttc

SEQ ID NO: 19859 - DNA, 201 bp, Homo sapiens
cctgcctgcctgcctgcctgcctgcctgcctgccttccttccttccttcctctgtttgttactttgtctttttttttttttaacttcctgacatttcggtygggtgcagtagctcacgcctgtaatcccagcactttgggaggccaaggtaggcggattatgaggtcaggagatcgagatcatcctggcctagagggtgaa

SEQ ID NO: 19860 - DNA, 201 bp, Homo sapiens
ttatgaggtcaggagatcgagatcatcctggcctagagggtgaaaccccgtctctactaaaatacaaaaaaaaaaagaaaatagctgggcatggtggcgcrcgcctgtagtcccagctactcgggaggctgaggcaggggaatagcttgaacttgggaggcggaggttgcagtgagctgttgcagtgagccgagatcgcac

SEQ ID NO: 19861 - DNA, 201 bp, Homo sapiens
tatgtcgaggttacccgacctattccatgaaaggcacaaccacaaagagaaagacaagctgggtcctgctggagacaagcctgcacttgccatttttttgktttgttttgtaattttattgaggtacaatctatatgacataaaaatcatccattttaagtgtccaattcattgatttttcataaatgtactgaattgtgc

SEQ ID NO: 19862 - DNA, 201 bp, Homo sapiens
ccaagtacttcacaaacacataattcacagggtagaaccagaacatcagctgtgtcaccctcatttggaagagcaaaggaatttatctccctaagcccttytaggcagcacagacttatcgtggactcagaagccagcaggctccttctctctggctctgacaccctgtgtaactgtccctgagccttctcagacagagct

SEQ ID NO: 19863 - DNA, 201 bp, Homo sapiens
ttgtaaagaccatcgaggctaggaagaaactgcatcaactaacaagcaaaataaccagctaacatcataatgacaggatcaaattcacacataacaatatyaactttaaatgtaaatggactaaatgctccaattaaaagacacagactggcaaattggataaagagtcaagactcatcagtgtgctgtattcaggaaacc

SEQ ID NO: 19864 - DNA, 201 bp, Homo sapiens
tccaaaattgacaccctaacatcacaattaaaagaactagaaaagcaagagcaaacacattcaaaagctagcagaaggcaagaaataactaaaatcagagmagaactgaaggaaatacagacacaaaaaaacccttcaaaaaattaatgaattcaggagctggttttttgaaaggatcaacaaaattgatagaccactagc

SEQ ID NO: 19865 - DNA, 201 bp, Homo sapiens
aaccaaacaccacatgttctcactcataggtgggaattgaacaatgagaacacatggacacaggaaggggaacatcacactctggggactgttgtggggtkgggggagaggggagggatagcattaggagatatacctgatgctaaatgacgagttaatgagtgcagcacaccagcatggcacatgtatacatatgtaact

SEQ ID NO: 19866 - DNA, 201 bp, Homo sapiens
taatagagaatattactctagggcaagcgtgatggcccacacctgtaatcccagcactttgggaggctgaggcaggtggatcgcttgagctcagaagttcragaccagcttgggcaacatggtgaaaccccatctctacaaaaattagccaggcatggtggcaggagcctgtagtccctagaaatttatgactcttctagg

SEQ ID NO: 19867 - DNA, 201 bp, Homo sapiens
tctactaataatacaaaaaaaattaggcaggcgtggtagcagacgcctgtaatcccagctactcaggaggctgagacaggagaatcacttgaacctgggargtggaagttgcagtaagctgagatggcagcactgtactccagcctgggtgacagagcaagactctgtctcaaaaaaaaaaaaaaagatatatatatatgt

SEQ ID NO: 19868 - DNA, 201 bp, Homo sapiens
ttttagtgtatgtcttacacatattttgttaaattatttgatatttcaaaaatgttttgtgataaaatgtgtgacatttatcactttaaccatgttttgtrataaaatgtatgacatttatcattttaaccatggaaaagtgttcattttttcaattgtttttgctagcatttaggaatattccatggtatgttgaattat

SEQ ID NO: 19869 - DNA, 201 bp, Homo sapiens
tagtttctctacatccttgtcaacacttgttatttttctttatatttatatatatatatatatatatatatatatatatatatatatatatatatatatawaatagccatcgttatggatgtgaagtgaaatttcattgtggtttttatttgtgttttcctaatgactagtgatgttaagcacttttcatgttcttatttg

SEQ ID NO: 19870 - DNA, 201 bp, Homo sapiens
ttcatgttcttatttgccgtttgtacacatttaattgttttgatgctgttggaaaagtgtttcattttttcaattgtttttgctagcatgtagagatagtytatggtatatggaattatttgttgctaacatataaaaatcattttttttttagatggagtcttgctctgtcgccaggctggaatgcagtggcaccatctc

SEQ ID NO: 19871 - DNA, 201 bp, Homo sapiens
ctccatgatttgagatgtgagccttatcatgtgctactttctgtgttcacttaggtccatttttgggcttttgtttttgttccatggtttggtagatctgktcataagccagtaacacattgtttcaattatcccagctctgtaatatgtttgtttgtttgtttatttacttttgagttggagtctcgctctgtcgcccag

SEQ ID NO: 19872 - DNA, 201 bp, Homo sapiens
atttttgtatttttagtagagatgggtttttgccatgttggccaggttggtctctaactcctgacctcaggtgatccgcctgccttggcctcctgaagtgstgggattacaggtgtgagccattgcacccggcctgtaatatgttttaatatctagaattgttggtcccctctgtttgtttttttttccagagtttccatg

SEQ ID NO: 19873 - DNA, 201 bp, Homo sapiens
gcttcaggcccaagcagtccaggaccctggacagcaccatggagccctgttgccctgttggaggcctcgctaaaactctgggtattaagggaagctccccratctaggcgagttctggcaggagcagcacctacctgcaagggcagtccttcaagttggatcaatttgctctgtctcctgcttgctcagggagctcctgta

SEQ ID NO: 19874 - DNA, 201 bp, Homo sapiens
catgaagcttttgaaatttggtgtgcatttaacacttatagttctgggcatgcttcaagtatgcaaaggtatacatggcttgcagctactgtattggataktgcagctctggatgtgctccacatggtgacaggacagctatagctgccccaaacatcatgtcttcacagctgtattcgaaggcagggatcagaaggtgac

SEQ ID NO: 19875 - DNA, 201 bp, Homo sapiens
tcaaggcctctgccttccaatgtaaccatcgctgattctccaaccagtcctcttataacacagttgccagactgttactgtccttctggtccttcattatrccagaaacatatgaccaaaagtagaatcaacctgcagatgtctgacactcagactgtcacctgtggggctgtcagagcctgttatggagacattgtgcat

SEQ ID NO: 19876 - DNA, 201 bp, Homo sapiens
ctggattagggcccacccctaatgactttatttttaacttaattacctctttaaagaggtaatatctgtctttatcttcaaatacactcacattctgagawactggggtttaggacttccacatataaatttagggtagacacacttcagcccataataatgttttaatatgtagtatagcaattatcccctccttgcttt

SEQ ID NO: 19877 - DNA, 201 bp, Homo sapiens
tcatccatgttaatgtgcatagatagctattagctgttaattttcattgtactgtgatattccatcacatgattatacaaccatttatccatttgctatgrcctgactgtgtctccccaaattcacatgttaaaaacttaatccccaatgtgacagtgttgggagatgggcctgatggaaggtgtttaggtcatgagggct

SEQ ID NO: 19878 - DNA, 201 bp, Homo sapiens
tctggacagagccaaggggctggatggaaagcagcaggtcttaaaaacaactatttgttttaaaatacataacgaatggatgtctttttatcacaaaagaktcatgcaaaacagaaatatggaataagaagcaaatgcccccttcatatgcctcccagactcctttccagactgtgacttccttcctgtgagtttctgtgt

SEQ ID NO: 19879 - DNA, 201 bp, Homo sapiens
gtggcccagtgcccattaatagtagacagaaaaaatgcattgtggtgcatttgtacaacaggatactacacacaaatgaaaatgaaccagcctcagtgatmcacaatgaaatgggtgaatctcaccaaatgtaacactgagcaaaagaggccaaacatggacatacatatggcaggggtctctgtacatcaaattcaaaag

SEQ ID NO: 19880 - DNA, 201 bp, Homo sapiens
tggtggcccttgctccccagagcctgctgtctaggagggagagggacagtagacgactgaatgagcacgtacatgaatgcagcaggtgctaaggctaggtkgcagaagaacagagtgccgcaaaggaaagcagctggtgggcgggttggagacttaccctgggtggggtgatcaagcctgggcgtctctgagaaggtggcc

SEQ ID NO: 19881 - DNA, 201 bp, Homo sapiens
ttgcttactggtgtcctgttacctttttttttttaatgctatatccagaatttggagcttataaagcaagcacaagttaggggttggtttgttctctctaycttaaatctcaagatcagcagtttttgaaatgacctcatgctcgtggtttccaaacctgcactggacttctctggcgatttgtgaacaggagggacatgc

SEQ ID NO: 19882 - DNA, 201 bp, Homo sapiens
ggcttttagttggatgtgaaattcagagcaggctttgtttgccttatgcgagaacacatgcctccaagaaggagcctgtgcagacaagcagcttgaggatygggaaagaactgactctgaaaaggcattttcatttgtcacgtaggtgtcacatgtgggggaaccactcaagacccatgtttttcgtcatccctctttttg

SEQ ID NO: 19883 - DNA, 201 bp, Homo sapiens
cagagaaagggcagacagaaaacagccaagccaccgggactggtaatccacacacggcttttagttggatgtgaaattcagagcaggctttgtttgccttrtgcgagaacacatgcctccaagaaggagcctgtgcagacaagcagcttgaggattgggaaagaactgactctgaaaaggcattttcatttgtcacgtagg

SEQ ID NO: 19884 - DNA, 201 bp, Homo sapiens
cttgaaggaggcagccttggggaaaatagaaataccagcggggctggcacagcacaggccctggcactggacagcatgggactgaattctggttctatcasctttgtgactttgtgtctcggtttcctcatctggaacaaggggaatgatgctattcatcttacagggctgttgtgcaaattagatgagttaatactttta

SEQ ID NO: 19885 - DNA, 201 bp, Homo sapiens
aggtctttgagcagcagatttccaagctaactgtagtgtttgagttgatgaggaatatttggaggaggtgtggtgccgtgtgtttccaagggcccctcttrtctctggttctctggttctagaacaacacaagcatatataccttccatgaagaaagagctccaggtacaagttgtggcaagagaattatctgctctgtgc

SEQ ID NO: 19886 - DNA, 201 bp, Homo sapiens
taggaaagagctagtaggttgatctcagtgaccagaaggaagtttagaggactctgagacctttccttgaaaagttagatgagattgagaaatccctgggrgctgacctggaaacctaagggacatggagagtggttcctggtcagtgtgttgctgctagttccaggccccctgggaggtctttgagcagcagatttccaa

SEQ ID NO: 19887 - DNA, 201 bp, Homo sapiens
cagcatcccagcccacctctgtctgcctccaccttggcccagtggaggaggagttctctccacccatgctctgggttccctgtcctttcccatcctcaggraagccttgggagaaggaggatgttttaggaaagagctagtaggttgatctcagtgaccagaaggaagtttagaggactctgagacctttccttgaaaagt

SEQ ID NO: 19888 - DNA, 201 bp, Homo sapiens
aagagtgtggacagaacgggggtagagaatgcagggcaggagcccagagccatggatatggcttcagaatggagcctgggatgctctgagcctcgtgggarttcatgggaagttttcgagggctgttgtatgccaggctttattctggtttcaggagagagagtgactaaggagtgctgttaagcttccctcacaatctgg

SEQ ID NO: 19889 - DNA, 201 bp, Homo sapiens
agctgggaggaggttgctgcaggaacccttggatgagcctaagtgtgagaagagtgtggacagaacgggggtagagaatgcagggcaggagcccagagccrtggatatggcttcagaatggagcctgggatgctctgagcctcgtgggagttcatgggaagttttcgagggctgttgtatgccaggctttattctggtttc

SEQ ID NO: 19890 - DNA, 201 bp, Homo sapiens
aaaataaattgcagttgatgccagtgaggagggaaagctgggaggaggttgctgcaggaacccttggatgagcctaagtgtgagaagagtgtggacagaaygggggtagagaatgcagggcaggagcccagagccatggatatggcttcagaatggagcctgggatgctctgagcctcgtgggagttcatgggaagttttc

SEQ ID NO: 19891 - DNA, 201 bp, Homo sapiens
tcatgagatttgtgagcttctagaatcaaaaccccgaaaaaaataaattgcagttgatgccagtgaggagggaaagctgggaggaggttgctgcaggaacycttggatgagcctaagtgtgagaagagtgtggacagaacgggggtagagaatgcagggcaggagcccagagccatggatatggcttcagaatggagcctg

SEQ ID NO: 19892 - DNA, 201 bp, Homo sapiens
atggtattccagctgctcctatctgagatgcacagtctccaccattacttgggccttttgttcaaagtttccacttccctctccaattttttttcatgctktgtgtgtgtcagaagcattcagtagcgtagggtatgtggaagtgaggcacctctcactgtttctttcctttacagagaatttctttggtcagtagctttg

SEQ ID NO: 19893 - DNA, 201 bp, Homo sapiens
tctgtggcttctgaggagccagctttcctgacgccctgagagtgtcctggttggttctgaggccacacatccacttcccttgtaaccagaaggaaatgccmaggagatagaggaaggaaatcagggcacacattccccagcatgtggattccggatggaaatgcagcttccctaagccctttctcatagggcttttggttt

SEQ ID NO: 19894 - DNA, 201 bp, Homo sapiens
gtacagacccttagggtggcattgaaaatccatcatctatttctctggctagtgctcagggtctgtggcttctgaggagccagctttcctgacgccctgaragtgtcctggttggttctgaggccacacatccacttcccttgtaaccagaaggaaatgccaaggagatagaggaaggaaatcagggcacacattccccag

SEQ ID NO: 19895 - DNA, 201 bp, Homo sapiens
tgaatggaagatctgagtgtctgagcaggctgtgtctgctcactttcctatgtggttaacgcaggagggctaccaggcacatgattggcatagagtcagtrttttctttggaaatgtataggactgggcatttgtgtccccagctgtggcccttcagccagagcctctgtcacaggaacccaggttcattcctggctccac

SEQ ID NO: 19896 - DNA, 201 bp, Homo sapiens
ttgataagcagacattaacaaatgatatatttgatttgcttttttctcattgtcaggacatttccaaagaggagggaaagaatggaatgtgggaaagagawgtcaggggttctcctgaccagaagggtgagggtgagggtccaggtgggagcactggggactgacgtgttcctgaggccacctgaatggaagatctgagtg

SEQ ID NO: 19897 - DNA, 201 bp, Homo sapiens
tcttacgtgcagtgactgaaaacgttgataagcagacattaacaaatgatatatttgatttgcttttttctcattgtcaggacatttccaaagaggagggraagaatggaatgtgggaaagagatgtcaggggttctcctgaccagaagggtgagggtgagggtccaggtgggagcactggggactgacgtgttcctgagg

SEQ ID NO: 19898 - DNA, 201 bp, Homo sapiens
aggatttgggttcctaagaatttatattccttttccagcgttttacagggaaccaaattgcaaaaatttaccagcagaaccccgaggcctactcacatacrgaggttggttaaatgttcctgtttgattgaaagtcacagttgaattcttttcataatatgttagaatagatacatcttacgtgcagtgactgaaaacgtt

SEQ ID NO: 19899 - DNA, 201 bp, Homo sapiens
gcacactactgtgcctggttggggcttacttttaaaagcttttatggtacctactcctatccagagcatgctacattaaactcactttgtggaggtaattrttcattctgtgtaggatttgggttcctaagaatttatattccttttccagcgttttacagggaaccaaattgcaaaaatttaccagcagaaccccgaggc

SEQ ID NO: 19900 - DNA, 201 bp, Homo sapiens
cagtagatatcaaacagatttaatgcttatttttaaaatatttaattattagaaacgaggtctcactgtgttgcccaggctggactcctgggctccagagytcctctcgcttcagcctcctgagtagctgggattacaagcgcacactactgtgcctggttggggcttacttttaaaagcttttatggtacctactcctat

SEQ ID NO: 19901 - DNA, 201 bp, Homo sapiens
ctcgctggagtagaagttttggggatagggccaactctacttgggccacctgaaataacaatatgtggatggggaaaataccccgatccctcacctggtgscttggtcagaacagtcaccgtgctgtgtgaagagcaagggttattcactcagggttgtccagtcctgatgtgggagaggccctccaggaaggcccagaag

SEQ ID NO: 19902 - DNA, 201 bp, Homo sapiens
gattgtgattaggccagcttgggttacatgacctcgctggagtagaagttttggggatagggccaactctacttgggccacctgaaataacaatatgtggrtggggaaaataccccgatccctcacctggtgccttggtcagaacagtcaccgtgctgtgtgaagagcaagggttattcactcagggttgtccagtcctga

SEQ ID NO: 19903 - DNA, 201 bp, Homo sapiens
tatttgtaacccggggattacaacaggacttacgttttgggtaggtttgaagctgaaagaagtcagtgcatgtaaggcacttagtgtagtgcctggcaatrttaaaaaaaaaaaaaaaaggaaaaaaaataatagtgtctctgttccacaggttcaaccttgtccccaggggtgattgtgattaggccagcttgggttaca

SEQ ID NO: 19904 - DNA, 201 bp, Homo sapiens
cttgggtttcccaacagcaacacggaagtatatactggaaggctggagcccagcaggcactgacaagcttatcaccagacctccggctacaccagcagctkcaggtaactgtggctacgtggtgtgagtgtgagaaacttctgcagagtcccaagtcctgtgggtcctgaagcctgctcatctcagtgttgcagctgtgct

SEQ ID NO: 19905 - DNA, 201 bp, Homo sapiens
tgatgagctctgtgactaagaagtggcaggggcaggtgtggagcccagttctttggcatgtggtctggggtctttctgtgtcttcaggaggctgtgacacyggtgtgtggtcatgtgaccatgtgcttgggtttcccaacagcaacacggaagtatatactggaaggctggagcccagcaggcactgacaagcttatcacc

SEQ ID NO: 19906 - DNA, 201 bp, Homo sapiens
aataaatgaatttcaggtaatattacaagcaatgtctttaaatgcagttttacaaaaggcatcaaaatccagaccaataattagttcttggaccttttctrtaagttgtagggtagacagggcagagttcctccccattttcttgaagtggaaaccaagtcccaggagggtgatgagctctgtgactaagaagtggcaggg

SEQ ID NO: 19907 - DNA, 201 bp, Homo sapiens
gaatgaatgaatgaatgaatgaatggggtgagtgaataaataaatgaatttcaggtaatattacaagcaatgtctttaaatgcagttttacaaaaggcatyaaaatccagaccaataattagttcttggaccttttctgtaagttgtagggtagacagggcagagttcctccccattttcttgaagtggaaaccaagtccc

SEQ ID NO: 19908 - DNA, 201 bp, Homo sapiens
gttaggtgcctctgttcccacgaccctgtcactgcagctccatagttgtacatttgtgtccttttccctgactcaactccagtagcctgaagaatagggaygaaagtatcctattcatctgtcgcaagcctggcatgatctatgtgcttaataaatgttcattgaatgaatgaatgaatgaatgaatggggtgagtgaata

SEQ ID NO: 19909 - DNA, 201 bp, Homo sapiens
cacaactcaagtgtcatccctgcctcctccaccttcccaccccacatccaagggtcctcacgtcccactgatttgtctgtgactcttgactctaccatctyttctccagcgctatctgcttgtcattcttctccaggtctctaccgcagcctccttgcctccagcctaccttccccgtgactcccacaagcctttaataca

SEQ ID NO: 19910 - DNA, 201 bp, Homo sapiens
atcttgtccacttctctctcccgaatcccaggcctggacacccatctccctcctagctaatccccgacccccatggctggatatcccacagatgcctcagrcttagcatgtcccagactgagttctgtctcccttcagacctcctcctttctgggttctctttctcagggaattctccccatccacccagggcacaactca

SEQ ID NO: 19911 - DNA, 201 bp, Homo sapiens
cccaagatcacacagtgctgggagtgggagtcaggacctgagtctatctcatccagtcccttggctgtgctgggatcacttttctccatgctggattactrtattttcaaatcctcactaggatgtaactaatttttctgaagatgcttcttcctccatgacctaacaggaatttattgttttggttcttgttaaacacaa

SEQ ID NO: 19912 - DNA, 201 bp, Homo sapiens
ttattatcgttgatatttacatgaggcacggagaggtgatgtcacttacccaagatcacacagtgctgggagtgggagtcaggacctgagtctatctcatycagtcccttggctgtgctgggatcacttttctccatgctggattactatattttcaaatcctcactaggatgtaactaatttttctgaagatgcttcttc

SEQ ID NO: 19913 - DNA, 201 bp, Homo sapiens
tctatccactccctccagcctctggctcctggacacagggagtctgggcctgatgctttgctctcatgggagctctctcctttgctcttcacttccctgtkgcagtgaagtcagatcactaatatagagggttgaaaatgcaaataaaagaaggcaaaagttggctgccttactttgttagtttttgagacaaggtctcac

SEQ ID NO: 19914 - DNA, 201 bp, Homo sapiens
ctggaataggggcctggaacaggtggccatcatctctatccactccctccagcctctggctcctggacacagggagtctgggcctgatgctttgctctcaygggagctctctcctttgctcttcacttccctgtggcagtgaagtcagatcactaatatagagggttgaaaatgcaaataaaagaaggcaaaagttggctg

SEQ ID NO: 19915 - DNA, 201 bp, Homo sapiens
ggtgatttctgatctgatgcagcctccaggaccaaacttgatcctagctctgccagcccctgctccggctgcaccccactgcctgcccaaggtttgatggrcacagatagagatggcagccacagccagggctgaaagaagccctcccagcaaaggctgggggtggtggagtcaggcaaaagtgagagagtcttctctgcc

SEQ ID NO: 19916 - DNA, 201 bp, Homo sapiens
gatgtcgagggcatctcataggccaaggccttcacctggggaggtgagcagtgggtgagaaccaggcttgggggccgggccaaggtgatttctgatctgaygcagcctccaggaccaaacttgatcctagctctgccagcccctgctccggctgcaccccactgcctgcccaaggtttgatggacacagatagagatggca

SEQ ID NO: 19917 - DNA, 201 bp, Homo sapiens
tgatgatgtcgagggcatctcataggccaaggccttcacctggggaggtgagcagtgggtgagaaccaggcttgggggccgggccaaggtgatttctgatytgatgcagcctccaggaccaaacttgatcctagctctgccagcccctgctccggctgcaccccactgcctgcccaaggtttgatggacacagatagagat

SEQ ID NO: 19918 - DNA, 201 bp, Homo sapiens
gtcagtgtcaggaggtcccagtgatgatgtcgagggcatctcataggccaaggccttcacctggggaggtgagcagtgggtgagaaccaggcttgggggcmgggccaaggtgatttctgatctgatgcagcctccaggaccaaacttgatcctagctctgccagcccctgctccggctgcaccccactgcctgcccaaggt

SEQ ID NO: 19919 - DNA, 201 bp, Homo sapiens
taactggtatgatttcttttttattggtgtaaccctgattcatacactggagaattggggtaaaggatggattttatccagataaactggctagaatgtamttcagagggggctgagccagaccaaggggcagagtgggagggtcgggggttagagacaatggtcagtgtcaggaggtcccagtgatgatgtcgagggcat

SEQ ID NO: 19920 - DNA, 201 bp, Homo sapiens
ttgttaaaaataactggtatgatttcttttttattggtgtaaccctgattcatacactggagaattggggtaaaggatggattttatccagataaactggstagaatgtacttcagagggggctgagccagaccaaggggcagagtgggagggtcgggggttagagacaatggtcagtgtcaggaggtcccagtgatgatg

SEQ ID NO: 19921 - DNA, 201 bp, Homo sapiens
tccctgaaactggaggccagctaagtgtgtgtcttccaaaagcttttttcagtcctccaatacctatctaaccaattccctatattacattctttttgttmaaaataactggtatgatttcttttttattggtgtaaccctgattcatacactggagaattggggtaaaggatggattttatccagataaactggctagaa

SEQ ID NO: 19922 - DNA, 201 bp, Homo sapiens
tgcagggtccccgagtccctgaaactggaggccagctaagtgtgtgtcttccaaaagcttttttcagtcctccaatacctatctaaccaattccctatatwacattctttttgttaaaaataactggtatgatttcttttttattggtgtaaccctgattcatacactggagaattggggtaaaggatggattttatccag

SEQ ID NO: 19923 - DNA, 201 bp, Homo sapiens
attgcactccagcctggataacaagagtgaaactccatctcaaaaaaaaagaaaaaaaagaaatacaaacatagcccttagggtcttagtgctcagcctcyaagatcccttagctccctaatcacctagaatggcaagttatggcctggccagtcagactcatatcaatgccaagccaggcctgcctgctgaggatcaaca

SEQ ID NO: 19924 - DNA, 201 bp, Homo sapiens
ctatccccaggctgtctcactggcagactcggtgatttgctaggaagtccaaaggtggcagccaatgagagcatctgttgacaccaggtcctcatgggaargtggagttggcatgactcctgggatcaggctcagcctcagctggtgtcaacactcccaggctcagaggacttacaaaaaacttccaggtactggagctac

SEQ ID NO: 19925 - DNA, 201 bp, Homo sapiens
cagggattcctgttctccttctatccccaggctgtctcactggcagactcggtgatttgctaggaagtccaaaggtggcagccaatgagagcatctgttgwcaccaggtcctcatgggaaagtggagttggcatgactcctgggatcaggctcagcctcagctggtgtcaacactcccaggctcagaggacttacaaaaaa

SEQ ID NO: 19926 - DNA, 201 bp, Homo sapiens
ttgttcttgcaggactcagggcggtgttcatgtgcacaaggatgggctgacggtcacttctccagtactaatgtgggtccaggtaagcgcagggattcctrttctccttctatccccaggctgtctcactggcagactcggtgatttgctaggaagtccaaaggtggcagccaatgagagcatctgttgacaccaggtcct

SEQ ID NO: 19927 - DNA, 201 bp, Homo sapiens
ttccagagtcatccaccatagggtttctcctggctttgcaatggtctgcctgccctgaggctctggtctacattctctgttgttcttgcaggactcagggyggtgttcatgtgcacaaggatgggctgacggtcacttctccagtactaatgtgggtccaggtaagcgcagggattcctgttctccttctatccccaggct

SEQ ID NO: 19928 - DNA, 201 bp, Homo sapiens
tcttatctagaaggcttctttagaagatgcttctgagaattgccacatctgggccactctgggcaatttgcctgtcttctctttccatctttgcagccctygtgcctgttcaatcaacagttcccacttggggttggggaaggttctccttcatctggacatttccagagtcatccaccatagggtttctcctggctttgc

SEQ ID NO: 19929 - DNA, 201 bp, Homo sapiens
tttctatgggcttagactttcatttctcttggctggatacttaggaattgaatggctagatcacatggttatctaatagcatcttggtgtggattctgagmctggttttctctttcctaacacatagttaaaagggttggattttatcagatcagctctttgcactagagtcttctaggggtgaggtgggtggggagaggg

SEQ ID NO: 19930 - DNA, 201 bp, Homo sapiens
cggtaaaccagcaacctccagtgtgagtgtcatagccatcgggaacatgtcacattgctgcagaaatcctgtttatggccagtttctttaaggcctgtttrtgacaggcttagggcctgttcccagcacccactagacttagacaaccactgatctccttttctcagtatagatgaatttgcgtcttctagtctgttccta

SEQ ID NO: 19931 - DNA, 201 bp, Homo sapiens
agcattcttttcaagaagcagagaaacaggctgtggctgattatctgcagcaggaacatgtccgtaaggcacagatcgcttatgccattgtttttggtttwggaatgccttgagtggttttccgccctggatgggccaggtgttccttgccctcattccggtaaaccagcaacctccagtgtgagtgtcatagccatcggg

SEQ ID NO: 19932 - DNA, 201 bp, Homo sapiens
gaaacaaagcattcttttcaagaagcagagaaacaggctgtggctgattatctgcagcaggaacatgtccgtaaggcacagatcgcttatgccattgtttktggttttggaatgccttgagtggttttccgccctggatgggccaggtgttccttgccctcattccggtaaaccagcaacctccagtgtgagtgtcatagc

SEQ ID NO: 19933 - DNA, 201 bp, Homo sapiens
tagagctgagagccacaaacagagttttgcccacatatttattgacagtaagcctgtgataaacattgtttctaaagattatagattagctgaaagcattycttatgggaaacaaagcattcttttcaagaagcagagaaacaggctgtggctgattatctgcagcaggaacatgtccgtaaggcacagatcgcttatgcc

SEQ ID NO: 19934 - DNA, 201 bp, Homo sapiens
ccatccattaaaaatgtataattaaaggtactttgccagatatagacctatagctgtgaaactaccaccacaatcaagatacagaatgtttatatcacccyccaaaagatcgcttttttccctgcttaccgagacaagctcggttgtggagactccaacgcaccagcactagaggaatgaagacaaagacccagaaataaa

SEQ ID NO: 19935 - DNA, 201 bp, Homo sapiens
ggaaacaagtcccttgttagatatgtgatctcaaaatttttgtcccattctgtgggttgtcttttcactttcttgatgatcctttgaagcaatgtttttarttttgataaagtctaatcttcctacttttttccttttgctatttgtgctttggtgcagtattggttaggttttggtatcaattttatatttacttcacta

SEQ ID NO: 19936 - DNA, 201 bp, Homo sapiens
tggacttctagcctccagaactgtgagaaaataaatgcctgttgtttaaaccatctagtttatggtattttgttatagcaacctgagcaaactaatacaaygtatacgtttttgtgtggacatatattttcatttctattgggtatattacctaaaagtggaattgcggggtcacatggtaactctgtgttcaacattttg

SEQ ID NO: 19937 - DNA, 201 bp, Homo sapiens
tctatctctggatttgctgattctggacatttcgtagacatgaatatatataatatgtgacagccttcttttacttagcataatgttttctttttaaaaawttttcatagctttttgcttgtttcaaataccaacttgaaccagatacctggcataatgttttcaaagttcatccatgtcatagcgtgtgtcagtacttca

SEQ ID NO: 19938 - DNA, 201 bp, Homo sapiens
aaccacaatcaactctctatctctggatttgctgattctggacatttcgtagacatgaatatatataatatgtgacagccttcttttacttagcataatgytttctttttaaaaatttttcatagctttttgcttgtttcaaataccaacttgaaccagatacctggcataatgttttcaaagttcatccatgtcatagcg

SEQ ID NO: 19939 - DNA, 201 bp, Homo sapiens
taatatgtttaacatacagcttttgctcactttggtagattgcacaaatgaccacaatactccacccatccctgtacccacaccctttgcaatgtgactgyaattcctcccatcaaggagtcgtttccctacctgttgatttgctttatccagtagaacaggggaagtggcattgtgccagttctaagcctaagcctcaag

SEQ ID NO: 19940 - DNA, 201 bp, Homo sapiens
atttaatttattttttttatttgagacaggagctggctgtcacccaagctggagtgcagtggtgtgattcagctcactgctatctatgcctcccgggctcragcaatcctccctccttagcctcccaagtagctggaaccacaggtgcgcccctaccatgaccagctaatttttttgtattttttttgtagagatggggtc

SEQ ID NO: 19941 - DNA, 201 bp, Homo sapiens
cccagatgattcttcagttgttgtaacaccaaccatgtttttatttaatttattttttttatttgagacaggagctggctgtcacccaagctggagtgcaktggtgtgattcagctcactgctatctatgcctcccgggctcaagcaatcctccctccttagcctcccaagtagctggaaccacaggtgcgcccctaccat

SEQ ID NO: 19942 - DNA, 201 bp, Homo sapiens
acatttgtatccaactttaatttttcccagatgattcttcagttgttgtaacaccaaccatgtttttatttaatttattttttttatttgagacaggagckggctgtcacccaagctggagtgcagtggtgtgattcagctcactgctatctatgcctcccgggctcaagcaatcctccctccttagcctcccaagtagct

SEQ ID NO: 19943 - DNA, 201 bp, Homo sapiens
aaaaatatttggagtttatccaggtacgtagtatgacatttgtatccaactttaatttttcccagatgattcttcagttgttgtaacaccaaccatgtttktatttaatttattttttttatttgagacaggagctggctgtcacccaagctggagtgcagtggtgtgattcagctcactgctatctatgcctcccgggct

SEQ ID NO: 19944 - DNA, 201 bp, Homo sapiens
attatgaaggaactcacctatgtttttatctagttcttgtaagatttcagctttcttacataaaaatatttggagtttatccaggtacgtagtatgacatwtgtatccaactttaatttttcccagatgattcttcagttgttgtaacaccaaccatgtttttatttaatttattttttttatttgagacaggagctggct

SEQ ID NO: 19945 - DNA, 201 bp, Homo sapiens
ccgaaggaagtcagctactgtaaggcaggggaacagacaggcgggtagccctgcgcacatgcacaaccagtgacctggaagcagattatagcccaaaaccytttttaaaaaattgaaatggcccaggcctggtggctcttgccggtaatcccagcactttgggaggccgaggcgagtggatcgcttgagcccaggagttcg

SEQ ID NO: 19946 - DNA, 201 bp, Homo sapiens
tcttattgggagctgacatctgctgtcaaaagacaaaattacaacaaatttaaagatcctaaatggattttatctgtgattctagaattggacaacacctyattctgtacaaaagaaggagtgttccaatgatctgagcaaaggatgtataaccacccgacaggttcaccttgcccactgcctagacagagccaatttatc

SEQ ID NO: 19947 - DNA, 201 bp, Homo sapiens
caactatttgttttaaaatacataacgaatggatgtctttttatcacaaaagattcatgcaaaacagaaatatggaataagaagcaaatgcccccttcatwtgcctcccagactcctttccagactgtgacttccttcctgtgagtttctgtgttagattgaatcatacggaattgccaatattgaagaagttttgattta

SEQ ID NO: 19948 - DNA, 201 bp, Homo sapiens
gcgtgtctgattcagtggttctgtacagtcatggtgggttctgtttttcttcttaggcactggatatcatcttggagaagatgaaggcttcgggcttcgamttctctcaagtcctagccttgtccggggcgggccaggttcgtttgcagcagactctgtctgccatgtgagggtgactgtcctgggcaatggtgtgggtgt

SEQ ID NO: 19949 - DNA, 201 bp, Homo sapiens
ctggggcagatctccaagtcagcggatggagcttaagcctgtgcctttgccctccttcccaggactgtttctccatcagcgactgcccggtgtggatggamtccagcaccacagcccagtgccgccagctggaggctgctgtgggtggtgctcaggctctcagctgcctcacggggtcccgtgcctatgaggtaggctgag

SEQ ID NO: 19950 - DNA, 201 bp, Homo sapiens
ttgtaacccggggattacaacaggacttacgttttgggtaggtttgaagctgaaagaagtcagtgcatgtaaggcacttagtgtagtgcctggcaatattwaaaaaaaaaaaaaaaggaaaaaaaataatagtgtctctgttccacaggttcaaccttgtccccaggggtgattgtgattaggccagcttgggttacatga

SEQ ID NO: 19951 - DNA, 201 bp, Homo sapiens
ttgggttcctaagaatttatattccttttccagcgttttacagggaaccaaattgcaaaaatttaccagcagaaccccgaggcctactcacatacagaggytggttaaatgttcctgtttgattgaaagtcacagttgaattcttttcataatatgttagaatagatacatcttacgtgcagtgactgaaaacgttgataa

SEQ ID NO: 19952 - DNA, 201 bp, Homo sapiens
ctgagtgtctgagcaggctgtgtctgctcactttcctatgtggttaacgcaggagggctaccaggcacatgattggcatagagtcagtattttctttggawatgtataggactgggcatttgtgtccccagctgtggcccttcagccagagcctctgtcacaggaacccaggttcattcctggctccacagttgctgaagc

SEQ ID NO: 19953 - DNA, 201 bp, Homo sapiens
gcacctttttaatcttagaaattaacatgtggtttattatttaatgatttgaggttccagattattctgcagcattagccattaatgtaggctttgggtaraggggtgaaaaccctccctaaattctgtgtgtggaacgaagtttgcctgacagaggacaggaggtgataacattctctccacagttccaaaggcccatga

SEQ ID NO: 19954 - DNA, 201 bp, Homo sapiens
tccggatggaaatgcagcttccctaagccctttctcatagggcttttggtttttgtctcttttgaacttggcagttttatggcccatcagaaactgtagaraatgaatgctctcccgaggagtctgctcatggtattccagctgctcctatctgagatgcacagtctccaccattacttgggccttttgttcaaagtttcc

SEQ ID NO: 19955 - DNA, 201 bp, Homo sapiens
cagctgggccctccactctgccccccttcactcacctgagatgtcacctcctcatttcacctgggcaggtgacaccatcagcatcccagcccacctctgtytgcctccaccttggcccagtggaggaggagttctctccacccatgctctgggttccctgtcctttcccatcctcagggaagccttgggagaaggaggatg

SEQ ID NO: 19956 - DNA, 201 bp, Homo sapiens
agacctttccttgaaaagttagatgagattgagaaatccctgggggctgacctggaaacctaagggacatggagagtggttcctggtcagtgtgttgctgstagttccaggccccctgggaggtctttgagcagcagatttccaagctaactgtagtgtttgagttgatgaggaatatttggaggaggtgtggtgccgtgt

SEQ ID NO: 19957 - DNA, 201 bp, Homo sapiens
gcagcagatttccaagctaactgtagtgtttgagttgatgaggaatatttggaggaggtgtggtgccgtgtgtttccaagggcccctcttatctctggttytctggttctagaacaacacaagcatatataccttccatgaagaaagagctccaggtacaagttgtggcaagagaattatctgctctgtgccagatttgtg

SEQ ID NO: 19958 - DNA, 201 bp, Homo sapiens
tttccaagctaactgtagtgtttgagttgatgaggaatatttggaggaggtgtggtgccgtgtgtttccaagggcccctcttatctctggttctctggttstagaacaacacaagcatatataccttccatgaagaaagagctccaggtacaagttgtggcaagagaattatctgctctgtgccagatttgtgcattttca

SEQ ID NO: 19959 - DNA, 201 bp, Homo sapiens
cagggaagcactgtagcgcacacacacacacacacacacacacacacacacacacacactctgcacacacccttatttgttcactcacccacaggcatacmcatgcagggtcttcagtttagcctaagatgtaagtcagtgtctggatcagtgccttgcacacagtaggtgctcaggtacatgccttatggtcagcgggac

SEQ ID NO: 19960 - DNA, 201 bp, Homo sapiens
attagaatagggataaaaatggcaggtgattgcatagctaaagaaaaagtgcacagagtgctgaaattctagggactactgatgaagcttgaaggaggcasccttggggaaaatagaaataccagcggggctggcacagcacaggccctggcactggacagcatgggactgaattctggttctatcagctttgtgactttg

SEQ ID NO: 19961 - DNA, 201 bp, Homo sapiens
ctggttctatcagctttgtgactttgtgtctcggtttcctcatctggaacaaggggaatgatgctattcatcttacagggctgttgtgcaaattagatgarttaatacttttaaagcacttaaaaaatagtgcctggtcccacaggtaatgggaaaaacatttacccatcacagcggccccacccatttgcagtggacact

SEQ ID NO: 19962 - DNA, 201 bp, Homo sapiens
ctcggtttcctcatctggaacaaggggaatgatgctattcatcttacagggctgttgtgcaaattagatgagttaatacttttaaagcacttaaaaaatartgcctggtcccacaggtaatgggaaaaacatttacccatcacagcggccccacccatttgcagtggacactggctgtgaatgccctggggtgttctactt

SEQ ID NO: 19963 - DNA, 201 bp, Homo sapiens
ctggaacaaggggaatgatgctattcatcttacagggctgttgtgcaaattagatgagttaatacttttaaagcacttaaaaaatagtgcctggtcccacmggtaatgggaaaaacatttacccatcacagcggccccacccatttgcagtggacactggctgtgaatgccctggggtgttctacttggccagccctgttc

SEQ ID NO: 19964 - DNA, 201 bp, Homo sapiens
aacaaggggaatgatgctattcatcttacagggctgttgtgcaaattagatgagttaatacttttaaagcacttaaaaaatagtgcctggtcccacaggtwatgggaaaaacatttacccatcacagcggccccacccatttgcagtggacactggctgtgaatgccctggggtgttctacttggccagccctgttctcca

SEQ ID NO: 19965 - DNA, 201 bp, Homo sapiens
aatacttttaaagcacttaaaaaatagtgcctggtcccacaggtaatgggaaaaacatttacccatcacagcggccccacccatttgcagtggacactggytgtgaatgccctggggtgttctacttggccagccctgttctccattgtcctgtggggacagtggagtagagagagagagaaaaagatctgggtgctgccc

SEQ ID NO: 19966 - DNA, 201 bp, Homo sapiens
cgtggcctgaagggtgggtggctgtgctgggcaggcgggatttacctcaacagagcacctttgctttgtccccgtccctcagggagccatttcttcctacwacgtccagcgctacggatttcctccaggatgcaaagtggtggccttcactggggacaacccaggtgagtatctcggggagtttcactctccagtgagcct

SEQ ID NO: 19967 - DNA, 201 bp, Homo sapiens
cctagggtgtgggtgggggttggaggtgggggctctgcgcctgcctggagagccctgtggtttgctttgtggttcccatgtggccgccagctaaccagaakctcccctcccattctcagcgtcgctggcaggcatgagactggaggaaggtgacattgcggtaaggcgacttcccacacccataggctctttctgtttcca

SEQ ID NO: 19968 - DNA, 201 bp, Homo sapiens
gctcctaagccctaagaaccattggagaatgtggctagttaatctagccctccctgcctcattgtgcccatggtagaatgtgcagaaacccaagctccctstctctacctggggctcctctgcgtcagcctcctgtgtaaacagcccaagacaagggcgtttccggcacctcccagggacattcaggggcctgaatctgag

SEQ ID NO: 19969 - DNA, 201 bp, Homo sapiens
tggagaatgtggctagttaatctagccctccctgcctcattgtgcccatggtagaatgtgcagaaacccaagctccctctctctacctggggctcctctgygtcagcctcctgtgtaaacagcccaagacaagggcgtttccggcacctcccagggacattcaggggcctgaatctgaggaagagcctccgatacctaagt

SEQ ID NO: 19970 - DNA, 201 bp, Homo sapiens
aggctgcaatgagctgtgattgcaccacttcactctagcctgggcgacagagcgagaccatgtctcaaaaaaataaaggaaaatgactcataatcccatcycctctctccaaccactggtatcatttagggacattttctcccagtctcctttatgagcttatttccatacagccatagttttgttcctttgtaccttata

SEQ ID NO: 19971 - DNA, 201 bp, Homo sapiens
tatacaagaaccaaagtttgtcagaagtcatctttgtggtgctgcgtatgatggccaggttacttttcctgcatttgggcactgagggtgttcttgttttytttgtttgtttgttttctttgttttgttttgttttgtttttctggagacagggtttcactcctgttgcccagactggagtgcagtggtgtgatcttggct

SEQ ID NO: 19972 - DNA, 201 bp, Homo sapiens
gggacagaatctttgttgtccaggttggtctcaaattcctgagctcaagcaatcctcctcctgccttggcctactgaagtgctaggattagtaggcataakccactatgctcagtcagtttattgtgaaaaatatcatgtatacagtagagtatatgtatcttacagcaagttataaaacatattaatcaaacatctgatg

SEQ ID NO: 19973 - DNA, 201 bp, Homo sapiens
ggttaatttcttcttaggcctctttccttagcttgtagatggtcaccttcttcctgtgtctccacatggtctcctcctgtgtgtccctgtgtcttcatttkctcttctcataaggacatcagtcatactggattagggcccacccctaatgactttatttttaacttaattacctctttaaagaggtaatatctgtcttta

SEQ ID NO: 19974 - DNA, 201 bp, Homo sapiens
cttcaaatacactcacattctgagatactggggtttaggacttccacatataaatttagggtagacacacttcagcccataataatgttttaatatgtagkatagcaattatcccctccttgcttttctttttaaaatattgtctgagctgtttataggtcttcatttttccacaaatattttataagaaattggtctagt

SEQ ID NO: 19975 - DNA, 201 bp, Homo sapiens
taggacttccacatataaatttagggtagacacacttcagcccataataatgttttaatatgtagtatagcaattatcccctccttgcttttctttttaaratattgtctgagctgtttataggtcttcatttttccacaaatattttataagaaattggtctagttccttaaaagagtccagctggaatttttatttagg

SEQ ID NO: 19976 - DNA, 201 bp, Homo sapiens
gacttccacatataaatttagggtagacacacttcagcccataataatgttttaatatgtagtatagcaattatcccctccttgcttttctttttaaaatmttgtctgagctgtttataggtcttcatttttccacaaatattttataagaaattggtctagttccttaaaagagtccagctggaatttttatttaggttg

SEQ ID NO: 19977 - DNA, 201 bp, Homo sapiens
ttataacacagttgccagactgttactgtccttctggtccttcattatgccagaaacatatgaccaaaagtagaatcaacctgcagatgtctgacactcaractgtcacctgtggggctgtcagagcctgttatggagacattgtgcatttttgggtgtagcctggggctgccttaactgttagagtaactgtattagctg

SEQ ID NO: 19978 - DNA, 201 bp, Homo sapiens
ctctccactacggacctcccccagctcatcctgactctattatcaccagggtagcatgaccaagcatactcctcttaaggcagtcgaggtggaatggaagrggtcagaagacatatgagggagagagcctggaaagtgcatcccacaatgtctgtgttccctctgaggaatggctcaccacagtagaacctctgtgtcctt

SEQ ID NO: 19979 - DNA, 201 bp, Homo sapiens
gtggactttacagctcagcaaaagagggatcttaaaccaataatcactgaaatatatgggcacaagttgggaaaagtgctctgaggaaaagcagatggtgytgagcgctaaggagggcctcctgagcaagtgatggtcttaggtgcatcttagctgaggagaagggaacaggcatgtgaagagtggaaagaacattccata

SEQ ID NO: 19980 - DNA, 201 bp, Homo sapiens
accaataatcactgaaatatatgggcacaagttgggaaaagtgctctgaggaaaagcagatggtgctgagcgctaaggagggcctcctgagcaagtgatgktcttaggtgcatcttagctgaggagaagggaacaggcatgtgaagagtggaaagaacattccatacagtgaaaaggctctgaggcagaatgagtggagag

SEQ ID NO: 19981 - DNA, 201 bp, Homo sapiens
caataatcactgaaatatatgggcacaagttgggaaaagtgctctgaggaaaagcagatggtgctgagcgctaaggagggcctcctgagcaagtgatggtyttaggtgcatcttagctgaggagaagggaacaggcatgtgaagagtggaaagaacattccatacagtgaaaaggctctgaggcagaatgagtggagagaa

SEQ ID NO: 19982 - DNA, 201 bp, Homo sapiens
attttatattgttaacaggcattacattgcacttaatatgtaactcaaatgaaaagtatacagtgaaaagtctttttttttctttttttctttcttttttwgagacagagtctggctctgtcgcgcaggctggagtgcagtggcacgatctcggctcactgcaagttccgcctcccgggttgtcctccattaggaaatggt

SEQ ID NO: 19983 - DNA, 201 bp, Homo sapiens
ttggctatttggggaacaaagattccttgagacatgtgggtgttcctacttagcctcagtttcttcattttactaaatctttgagtgttaccccagatgartcctctgttaccacgattacggtgaggcagccctgccttcaaggaggtctctaggttgaactgctcctagggtgtggggcctcatctggtgacgttagta

SEQ ID NO: 19984 - DNA, 201 bp, Homo sapiens
gtgaacatcttcctctagagggtcttggctttggctatttggggaacaaagattccttgagacatgtgggtgttcctacttagcctcagtttcttcatttkactaaatctttgagtgttaccccagatgagtcctctgttaccacgattacggtgaggcagccctgccttcaaggaggtctctaggttgaactgctcctag

SEQ ID NO: 19985 - DNA, 201 bp, Homo sapiens
gaagtcagctactgtaaggcaggggaacagacaggcgggtagccctgcgcacatgcacaaccagtgacctggaagcagattatagcccaaaaccttttttwaaaaattgaaatggcccaggcctggtggctcttgccggtaatcccagcactttgggaggccgaggcgagtggatcgcttgagcccaggagttcgagacca

SEQ ID NO: 19986 - DNA, 201 bp, Homo sapiens
cccggggcccccgcgcccctgccctgcgcgcggccgtggggcgccggtgccctcgcccggagatgccctgccaatgccacccgctcgcaagatgcggcctsgaccccgcctggacccagctaccccaggaaactgcaggcgctcctcggcaggacccccggtgcccagaggggccggaggactcggcgggttcctgcgctg

SEQ ID NO: 19987 - DNA, 201 bp, Homo sapiens
ctacctctcgggcttcccggggcccccgcgcccctgccctgcgcgcggccgtggggcgccggtgccctcgcccggagatgccctgccaatgccacccgctygcaagatgcggcctcgaccccgcctggacccagctaccccaggaaactgcaggcgctcctcggcaggacccccggtgcccagaggggccggaggactcgg

SEQ ID NO: 19988 - DNA, 201 bp, Homo sapiens
caagttcagcaagggagacagaccattgcaagtgcatgaaaagggcactggtgggctgggaagttcgtaggaggagcctctcacatgctgggtttggggargaattctggaaagcagttagtcttagggacgggaaggatgtagctggtgggacgggcgccctcagctccatgaataaaaggagtgggtctgactctggtt

SEQ ID NO: 19989 - DNA, 201 bp, Homo sapiens
tacgaagttcaaagtgagtttatactggtagacatcagaatagtgattgccttgggagtttaggaagggtcatgaaggaaacttctggagtggtggaaatrttctgttttgatctcagtgtttatatgggtatatacatacattttaaaaaagtcattggccaggcacggtgactcacgcctgtaatcccagcactttggg

SEQ ID NO: 19990 - DNA, 201 bp, Homo sapiens
agctttccctctccccacatgcatacttggagataaggctgtatgtgagcctacattaagaaggctgctgtctacaagccaagaaaagagccctcaccagkaactgaatttgctagccccttgatgttagaattcccagcctccagaactgtgggaaataaatacctgtcatttaagccatcaatctgtggcaatttgtga

SEQ ID NO: 19991 - DNA, 201 bp, Homo sapiens
tattaaattttaagaagaggaaaagatgagagagctttccctctccccacatgcatacttggagataaggctgtatgtgagcctacattaagaaggctgckgtctacaagccaagaaaagagccctcaccaggaactgaatttgctagccccttgatgttagaattcccagcctccagaactgtgggaaataaatacctgt

SEQ ID NO: 19992 - DNA, 201 bp, Homo sapiens
gtcttccttcttagctggaaatgccagttttgttttgtgtgtgtgtgtgtgtgtgtgtgtgtgtgtgtgtgtgtgtgtgtgtgtgtgtttttgagacagarccttgctctgttgcgcccaggctggagtgcagtggcaagatctcagctcattgcatcctccgcctcctgggttcaaacaattctcccaccttagtctccc

SEQ ID NO: 19993 - DNA, 201 bp, Homo sapiens
ttgaacctgggaggtggaggttgcagtgagctgagaccgcaccattgcactccagcctggataacaagagtgaaactccatctcaaaaaaaaagaaaaaaragaaatacaaacatagcccttagggtcttagtgctcagcctctaagatcccttagctccctaatcacctagaatggcaagttatggcctggccagtcaga

SEQ ID NO: 19994 - DNA, 201 bp, Homo sapiens
cttagctccctaatcacctagaatggcaagttatggcctggccagtcagactcatatcaatgccaagccaggcctgcctgctgaggatcaacaggaaaggmgaatgcctgtagcaggatctggtgacctagggggccacaggagcagggatgtggacagcatagacaggcgtggtagctccaggggctacctcatcatatg

SEQ ID NO: 19995 - DNA, 201 bp, Homo sapiens
gagctggagaccagcctgggcaaacatgagacctcatctctttaaaaaaaaaaaaaaaaaaaaaaagctggcagccaagatggccaaataggaacagctcsggtctacagctcccagcatgagcaacgcagaagatgggtgatttctgcattttccatctgaggtactgggttcatctcactagggagtgccagacagtgg

SEQ ID NO: 19996 - DNA, 201 bp, Homo sapiens
ttttgtagcttctttaaaatttctacattacaaaataaatatttcattcttaaaaatgtatgtgcataccatttttaatgactgtataatattctatctgrgtagaccaggcacggtggctcatacctataatcccagcactttgggaggctgaggcgggaggatcacttgaggccaggagctggagaccagcctgggcaa

SEQ ID NO: 19997 - DNA, 201 bp, Homo sapiens
attttctcccagtctcctttatgagcttatttccatacagccatagttttgttcctttgtaccttatatgcaaagggtgtatacaagaaccaaagtttgtyagaagtcatctttgtggtgctgcgtatgatggccaggttacttttcctgcatttgggcactgagggtgttcttgttttttttgtttgtttgttttctttg

SEQ ID NO: 19998 - DNA, 201 bp, Homo sapiens
ttagtaggcataagccactatgctcagtcagtttattgtgaaaaatatcatgtatacagtagagtatatgtatcttacagcaagttataaaacatattaaycaaacatctgatgatcagcactcgggttaagaaatagaacatcagccaggcacagtcacttacacctgtaatcccagcactttgggaggccgatacaggc

SEQ ID NO: 19999 - DNA, 201 bp, Homo sapiens
tttcatcagctgaaaagtgattctcactttgagttttcttcctatatttgtatagtgagttcctttttccttcctctttatccctcctgttttactttatrcctctctattccttgctcaaattattgcaaaagcctctatagaaagtcctctgtgatctgactcctgcagactcttccagatttttctgcccaaggcctt

SEQ ID NO: 20000 - DNA, 201 bp, Homo sapiens
  misc_feature 120: n = A,T,C or G
caagccctaaccctgtcataaacaggccttaaataaactggccataaacaggatttctgcagcaatgggacatgctcatgatggctgtcatgcacactgckaaaagttgttggtttactngagcagggcaaggaacacctggccccgcccggagcaaaaaactgctcaaaccacaaacgatagcaggaaaggcctgtgcct

SEQ ID NO: 20001 - DNA, 201 bp, Homo sapiens
agtggcagagggtcagatgtggggccaaagggctgtgagcagcgcagatgaataaggaagacataacccagacattcctacttctagtgggaaagtcatayggggaaccagccatcacccaaaccattatttagatgcagttgtgggaaatcagcacagaagatccatgagatctgcatctggggagctaactcctggctc

SEQ ID NO: 20002 - DNA, 201 bp, Homo sapiens; identical to SEQ ID NO: 4476

SEQ ID NO: 20003 - DNA, 201 bp, Homo sapiens; identical to SEQ ID NO: 413

SEQ ID NO: 20004 - DNA, 201 bp, Homo sapiens; identical to SEQ ID NO: 390

SEQ ID NO: 20005 - DNA, 201 bp, Homo sapiens; identical to SEQ ID NO: 394

SEQ ID NO: 20006 - DNA, 201 bp, Homo sapiens; identical to SEQ ID NO: 4480

SEQ ID NO: 20007 - DNA, 201 bp, Homo sapiens; identical to SEQ ID NO: 4481

SEQ ID NO: 20008 - DNA, 201 bp, Homo sapiens; identical to SEQ ID NO: 4482

SEQ ID NO: 20009 - DNA, 201 bp, Homo sapiens
aaaccctgtctctactaatacaaaatattagctggacatggtggcaggcacctgtaatcccagctactcgggaggctgaggcaggagaattgcttgaaccyaggaggtggaggttgcagtgagccgagatcacaccactgcattccagcctgggtgacacagcgagactccatctcaaaaaaagaaaaagaaaattatccc

SEQ ID NO: 20010 - DNA, 201 bp, Homo sapiens
ggagaagataaccttactaaatagtaacaaacacaactggtaaagttcaatgttccagaaacacggcaggggaaaggagatgcactgtcagctgtcttggkcagagaggccagctctaccctgtcgaggaagaagaaagcacaggcaaagaagagagcagaggatggtggcgggggaagcgtgggcacagccagcaggtga

SEQ ID NO: 20011 - DNA, 201 bp, Homo sapiens
aaatagtaacaaacacaactggtaaagttcaatgttccagaaacacggcaggggaaaggagatgcactgtcagctgtcttggtcagagaggccagctctaycctgtcgaggaagaagaaagcacaggcaaagaagagagcagaggatggtggcgggggaagcgtgggcacagccagcaggtgactcatccatgctcatgac

SEQ ID NO: 20012 - DNA, 201 bp, Homo sapiens
ggatgcaatggtgcaaaggcattttcctcaataaacgctgctggaacaactggacatcctcatgaaagagaataaatctagaccagaccgtataccctccrcgaacataaattcaaaatgaatcacaggcctggcacggtggctcacgcctgtaatcccagctttcaaggaggcagaggcaggaggattgcttgagcccag

SEQ ID NO: 20013 - DNA, 201 bp, Homo sapiens
ctacttgagaggctgaggcaggagaatcgcttgaacctgcgaggcgtaggttgcagtgagccaagatcgccccattgcactccagtctgggcgacaagaaygaaactgtctcgaggaaaacaaaaaagaaatacaaaacttagcatggtggcatgcacctgtagtcccagctacttgggaggctaaggcaggaggatcgct

SEQ ID NO: 20014 - DNA, 201 bp, Homo sapiens
cgtaggttgcagtgagccaagatcgccccattgcactccagtctgggcgacaagaatgaaactgtctcgaggaaaacaaaaaagaaatacaaaacttagcmtggtggcatgcacctgtagtcccagctacttgggaggctaaggcaggaggatcgcttgagcctgggaagtagaggctgcagtgagccaagaccgtgccac

SEQ ID NO: 20015 - DNA, 201 bp, Homo sapiens
atatgtcagcagggaaatgcaaactagaacaatgagatgccacacacacctatcagaatggcaaacatccaaacactgacaacaccaaatgctggtgaggrtctggagcaatagcaacccttgttcactgctggtgagaatgcaagatgctgcagccactttggaagacagttcaccacaagcttgtccaacccaaggccc

SEQ ID NO: 20016 - DNA, 201 bp, Homo sapiens
ccttgtcttaaaaataaaaaaaaaagggccaggtacggtggctcacacctgcgtaatcccagaactttgggaggccgaggcgagtggatcacaaggtcaaragagaccatcctggccaacatggtgaaaccctgtctctactaaaaatacaaaaattaaatttaaaaataaagtaaattaaaattgcaaaaattagctgag

SEQ ID NO: 20017 - DNA, 201 bp, Homo sapiens
gccggggccggggcgaggacgacgcgcggtgggaccgacacccgcgcctgcgccctgggccgcgccgccactggagccgtgtcctgggcttccggggcggraactggggccccgtgtcccgtgcgggcctccgtcctcgggcgagcagggcccttcgctccgggaggggaggtgacgcggcgcgggctggacggccggaga

SEQ ID NO: 20018 - DNA, 201 bp, Homo sapiens
gggcggaaactggggccccgtgtcccgtgcgggcctccgtcctcgggcgagcagggcccttcgctccgggaggggaggtgacgcggcgcgggctggacggycggagacgcggggtcagggcgcggacgaggggagcgcagggtcggaggggctcccggacgctgcccgcccagcgtcggctctcgttggcccctggctgcg

SEQ ID NO: 20019 - DNA, 201 bp, Homo sapiens
tgggctgaggtcattggcaacaatttcccggactttactcccagcatttgtgtaagctcgcgattatattatcattgcatacctagagtagctttatgttytccagactgaagcctccccaattcagtttggggttctggaaggatatgggttatattgttattaccagttatgccctttcttcctttttaatttactttt

SEQ ID NO: 20020 - DNA, 201 bp, Homo sapiens
ttaatttacttttattgcttttattttatttgagacggagtcctgctctgtcccccaggctggagtgcagtggcgcgatctcagctcactgcaccctccayctcccgggttcaagctattctcctgcctcagcctcctgagtagctgggattacaggcgcccaccaccacgcccggctaatttttgtatttttattttatt

SEQ ID NO: 20021 - DNA, 201 bp, Homo sapiens
taaagtagtctgctgtcatgtgccctgttcaggcagaagctttaaagggtgttttgtggtttggtccctccccttctgcccccagcatgaacacagcatgkgcacagtgagggctggtttttcaccccagatcctgtaacaaaggcccatgaagtacagccgttgtagctgatgggcagcaccagcaagaagtaaaccatc

SEQ ID NO: 20022 - DNA, 201 bp, Homo sapiens
actgtctctcatcaggtccaggaggactcagcaggctgatgcagagggacacagcgcatccgccttggtggatgcatggctttcctggctcccctgggacrggggaggagggtgaagatggagggaatctggctggctgggccttgtgtactggggggtggagggcccatttgactgcaggaattgctcaagcacataagc

SEQ ID NO: 20023 - DNA, 201 bp, Homo sapiens; identical to SEQ ID NO: 4483

SEQ ID NO: 20024 - DNA, 201 bp, Homo sapiens; identical to SEQ ID NO: 4484

SEQ ID NO: 20025 - DNA, 201 bp, Homo sapiens; identical to SEQ ID NO: 4485

SEQ ID NO: 20026 - DNA, 201 bp, Homo sapiens; identical to SEQ ID NO: 4487

SEQ ID NO: 20027 - DNA, 201 bp, Homo sapiens; identical to SEQ ID NO: 4488

SEQ ID NO: 20028 - DNA, 201 bp, Homo sapiens; identical to SEQ ID NO: 392

SEQ ID NO: 20029 - DNA, 201 bp, Homo sapiens; identical to SEQ ID NO: 391

SEQ ID NO: 20030 - DNA, 201 bp, Homo sapiens; identical to SEQ ID NO: 399

SEQ ID NO: 20031 - DNA, 201 bp, Homo sapiens; identical to SEQ ID NO: 4497

SEQ ID NO: 20032 - DNA, 201 bp, Homo sapiens; identical to SEQ ID NO: 4498

SEQ ID NO: 20033 - DNA, 201 bp, Homo sapiens; identical to SEQ ID NO: 409

SEQ ID NO: 20034 - DNA, 201 bp, Homo sapiens; identical to SEQ ID NO: 4505

SEQ ID NO: 20035 - DNA, 201 bp, Homo sapiens
acaaaatgcaagtgagatcaggctttccctctatattacaatatagtttggactgaatttctcccggactcaagtctcacgttgaattttactttactaawtctctagacaggcttggatcttctgcggaagccaaaggaatttctctgagcaataacagcaatctgcaaacaagctgggatgaaaaatgctttaggaaaa

SEQ ID NO: 20036 - DNA, 201 bp, Homo sapiens
tgtttcataggccttgaactgtcaagcttaaattatcccaacaggctgtgcgcagtggctcacccctataatcccagcgctttgggaggctgaggcgggcrgatcacaaggtcaggagatcgagaccatcctggctaacatggtgaaaccctgtctctactaatacaaaatattagctggacatggtggcaggcacctgta

SEQ ID NO: 20037 - DNA, 201 bp, Homo sapiens
acaggctgtgcgcagtggctcacccctataatcccagcgctttgggaggctgaggcgggcggatcacaaggtcaggagatcgagaccatcctggctaacayggtgaaaccctgtctctactaatacaaaatattagctggacatggtggcaggcacctgtaatcccagctactcgggaggctgaggcaggagaattgcttg

SEQ ID NO: 20038 - DNA, 201 bp, Homo sapiens
ggagatcgagaccatcctggctaacatggtgaaaccctgtctctactaatacaaaatattagctggacatggtggcaggcacctgtaatcccagctactcrggaggctgaggcaggagaattgcttgaacccaggaggtggaggttgcagtgagccgagatcacaccactgcattccagcctgggtgacacagcgagactc

SEQ ID NO: 20039 - DNA, 201 bp, Homo sapiens
ggcaggcacctgtaatcccagctactcgggaggctgaggcaggagaattgcttgaacccaggaggtggaggttgcagtgagccgagatcacaccactgcaytccagcctgggtgacacagcgagactccatctcaaaaaaagaaaaagaaaattatcccaacaatacaactcagaaatctcatatgacaacaagtacagca

SEQ ID NO: 20040 - DNA, 201 bp, Homo sapiens; identical to SEQ ID NO: 4507

SEQ ID NO: 20041 - DNA, 201 bp, Homo sapiens; identical to SEQ ID NO: 4508

SEQ ID NO: 20042 - DNA, 201 bp, Homo sapiens; identical to SEQ ID NO: 4509

SEQ ID NO: 20043 - DNA, 201 bp, Homo sapiens
gccggcgtcaacagcgcgcgccgtgattagctagtatttcccggcctcggccaaattcgaagggattggccggggccggggcgaggacgacgcgcggtggraccgacacccgcgcctgcgccctgggccgcgccgccactggagccgtgtcctgggcttccggggcggaaactggggccccgtgtcccgtgcgggcctccg

SEQ ID NO: 20044 - DNA, 201 bp, Homo sapiens
gaatcacttgaacctgggaggtggaggttgcagtgagctgagatcatgccactgcactgcagcctgggtgacagagtgagacactgtctcaaaaaaaaaamacaaaaacaaaaaaactgaaggagcaggaaagctcttttgctagtccctgtttcttagtgtgctgcaacttccaccacacagggaataaagtctttctca

SEQ ID NO: 20045 - DNA, 201 bp, Homo sapiens
aactgaaggagcaggaaagctcttttgctagtccctgtttcttagtgtgctgcaacttccaccacacagggaataaagtctttctcaccatcagtgggctsgggctgtcacaacagactaccttagactggggaactgaagcaataggcatttattggctggaagtccaagattaaggtgcccgacagattgctgcctggt

SEQ ID NO: 20046 - DNA, 201 bp, Homo sapiens
taaaaaaagaaaaccgtcactaaaaacacaaaattaatcaaggaagaggggagggggaaatggaataaccgagcttgcagcacacgcagcaccagtcatgyggtgagcccctctgagctggcgcctcgtgcctcagaatcaggtagactcttgttataagattacagttacccttaactgctccagagataacaacttgaa

SEQ ID NO: 20047 - DNA, 201 bp, Homo sapiens
atcacattaggacttcatttaaccttaattagctccttggccaggtgcgttggctcacgcctgtaatctcagcactttgggaggcagaggcgggcagatcwcgagatcaggagctcgagaccagcctggccaacgtggtgaaaccccgtctctactaaatatacacaaattagctgggtgtggtgacgggcgcctgtaatc

SEQ ID NO: 20048 - DNA, 201 bp, Homo sapiens
ttgggaggctaaagcaggtggatcacctgaggtcaggagttcaagaccagcctggccaacatgacgaaaccccatcactaactaaaaaatagaaaaattagccgggcgtggtggtgggcacctgtgatcacagctacttgagaggctgaggcaggagaatcgcttgaacctgcgaggcgtaggttgcagtgagccaagatc

SEQ ID NO: 20049 - DNA, 201 bp, Homo sapiens
ccctggattacagtctaccagacgaggcactcttacctttcgaggcgattattcttgggaggcaccctcagccagaaatatagatgaaattcaaagctgttctctgttttcagaaccacctgcctctgatgtagaccaagaaattgctggtagctttctaagtgttgagtttgcattggttttttccccatgagctcttga

SEQ ID NO: 20050 - DNA, 201 bp, Homo sapiens
cctggattacagtctaccagacgaggcactcttacctttcgaggcgattattcttgggaggcaccctcagccagaaatatagatgaaattcaaagctgttctctgttttcagaaccacctgcctctgatgtagaccaagaaattgctggtagctttctaagtgttgagtttgcattggttttttccccatgagctcttgag

SEQ ID NO: 20051 - DNA, 201 bp, Homo sapiens
accatcatgcccggctaattttttttgtattttttagtagagacggggtttcaccgtgttagccaggatggtctcgatctcctgacctcatgatccgcccrtctcagcctcccaaagtgctgagattacaggcgtgagccactgcgcccggccaatttattttttaatttaattttttttttgagacggagtttctgtctt

SEQ ID NO: 20052 - DNA, 201 bp, Homo sapiens
ctcgatctcctgacctcatgatccgcccatctcagcctcccaaagtgctgagattacaggcgtgagccactgcgcccggccaatttattttttaatttaattttttttttgagacggagtttctgtcttgtggcccagagtggagtgcaatggcatgatcttggctcactgcaacctccacttcccgggttcaacctattc

SEQ ID NO: 20053 - DNA, 201 bp, Homo sapiens; identical to SEQ ID NO: 403

SEQ ID NO: 20054 - DNA, 201 bp, Homo sapiens; identical to SEQ ID NO: 4532

SEQ ID NO: 20055 - DNA, 201 bp, Homo sapiens; identical to SEQ ID NO: 4533

SEQ ID NO: 20056 - DNA, 201 bp, Homo sapiens; identical to SEQ ID NO: 4540

SEQ ID NO: 20057 - DNA, 201 bp, Homo sapiens; identical to SEQ ID NO: 4543

SEQ ID NO: 20058 - DNA, 201 bp, Homo sapiens; identical to SEQ ID NO: 4546

SEQ ID NO: 20059 - DNA, 201 bp, Homo sapiens; identical to SEQ ID NO: 4547

SEQ ID NO: 20060 - DNA, 201 bp, Homo sapiens; identical to SEQ ID NO: 4551

SEQ ID NO: 20061 - DNA, 201 bp, Homo sapiens; identical to SEQ ID NO: 4552

SEQ ID NO: 20062 - DNA, 201 bp, Homo sapiens; identical to SEQ ID NO: 4553

SEQ ID NO: 20063 - DNA, 201 bp, Homo sapiens; identical to SEQ ID NO: 4554

SEQ ID NO: 20064 - DNA, 201 bp, Homo sapiens
aagacatgaactattggtcgggcatggtggctcatgcctgtaatcccagcactgtgggaggccgacgtgggaggatcacttgaggtcaggagttcaagacmaccctggccaacatggtgaaaccctgtctctactaaaacataaaaattagctgtgcatggtcgtacgcgcctgtaatcccagctactcaggaggctgagg

SEQ ID NO: 20065 - DNA, 201 bp, Homo sapiens; identical to SEQ ID NO: 4556

SEQ ID NO: 20066 - DNA, 201 bp, Homo sapiens; identical to SEQ ID NO: 4557

SEQ ID NO: 20067 - DNA, 201 bp, Homo sapiens; identical to SEQ ID NO: 4558

SEQ ID NO: 20068 - DNA, 201 bp, Homo sapiens
ctgaggcaggataatcgcttgaactcaggaggcagaggttgcaatgagctgagatcgtgccactgcactccagcctgggtgacagaatgagagactgtctccccaaaaaaaaaaaaaaaagcgtgtggaaaatataatccaaataccaactatggttctatctgtgaaacaatctctagctacataaatgtttgctcttct

SEQ ID NO: 20069 - DNA, 201 bp, Homo sapiens; identical to SEQ ID NO: 4565

SEQ ID NO: 20070 - DNA, 201 bp, Homo sapiens; identical to SEQ ID NO: 4567

SEQ ID NO: 20071 - DNA, 201 bp, Homo sapiens; identical to SEQ ID NO: 4568

SEQ ID NO: 20072 - DNA, 201 bp, Homo sapiens
ccgtgtcctgggcttccggggcggaaactggggccccgtgtcccgtgcgggcctccgtcctcgggcgagcagggcccttcgctccgggaggggaggtgacrcggcgcgggctggacggccggagacgcggggtcagggcgcggacgaggggagcgcagggtcggaggggctcccggacgctgcccgcccagcgtcggctct

SEQ ID NO: 20073 - DNA, 201 bp, Homo sapiens; identical to SEQ ID NO: 4571

SEQ ID NO: 20074 - DNA, 201 bp, Homo sapiens; identical to SEQ ID NO: 4572

SEQ ID NO: 20075 - DNA, 201 bp, Homo sapiens; identical to SEQ ID NO: 4577

SEQ ID NO: 20076 - DNA, 201 bp, Homo sapiens
caggcacctgccaccacgcccagctaatttttgtattagtagagatgggttttcaccatgtttgccaggccggtctcaaattcctgacctcgggtgatccrcccacgtcagcctccctaagtgctgggattacagacgtgaaccactgcacctggcctaccctttcttcctttacgtcaagcttagtggtgagacttccaa

SEQ ID NO: 20077 - DNA, 201 bp, Homo sapiens
tggtgagacttccaaatggtaatgtaaagtagtctgctgtcatgtgccctgttcaggcagaagctttaaagggtgttttgtggtttggtccctccccttcygcccccagcatgaacacagcatgtgcacagtgagggctggtttttcaccccagatcctgtaacaaaggcccatgaagtacagccgttgtagctgatgggc

SEQ ID NO: 20078 - DNA, 201 bp, Homo sapiens
agaagtaaaccatcgtgatttcgagtcactgagacttcgggatcctttgttaccacagcacaacctagcgaacgcttacaagtactaagaatagtacttaytattcccttacatagataagtaataaaagtaatatccttttttctgattgatgtctccttataaaattccatcttgttgccttccagaggatgaagggga

SEQ ID NO: 20079 - DNA, 201 bp, Homo sapiens; identical to SEQ ID NO: 4583

SEQ ID NO: 20080 - DNA, 201 bp, Homo sapiens; identical to SEQ ID NO: 4584

SEQ ID NO: 20081 - DNA, 201 bp, Homo sapiens; identical to SEQ ID NO: 4585

SEQ ID NO: 20082 - DNA, 201 bp, Homo sapiens; identical to SEQ ID NO: 4586

SEQ ID NO: 20083 - DNA, 201 bp, Homo sapiens; identical to SEQ ID NO: 4587

SEQ ID NO: 20084 - DNA, 201 bp, Homo sapiens; identical to SEQ ID NO: 4588

SEQ ID NO: 20085 - DNA, 201 bp, Homo sapiens; identical to SEQ ID NO: 4589

SEQ ID NO: 20086 - DNA, 201 bp, Homo sapiens; identical to SEQ ID NO: 4590

SEQ ID NO: 20087 - DNA, 201 bp, Homo sapiens; identical to SEQ ID NO: 4591

SEQ ID NO: 20088 - DNA, 201 bp, Homo sapiens; identical to SEQ ID NO: 4592

SEQ ID NO: 20089 - DNA, 201 bp, Homo sapiens; identical to SEQ ID NO: 4593

SEQ ID NO: 20090 - DNA, 201 bp, Homo sapiens; identical to SEQ ID NO: 4594

SEQ ID NO: 20091 - DNA, 201 bp, Homo sapiens; identical to SEQ ID NO: 398

SEQ ID NO: 20092 - DNA, 201 bp, Homo sapiens; identical to SEQ ID NO: 395

SEQ ID NO: 20093 - DNA, 201 bp, Homo sapiens; identical to SEQ ID NO: 393

SEQ ID NO: 20094 - DNA, 201 bp, Homo sapiens; identical to SEQ ID NO: 389

SEQ ID NO: 20095 - DNA, 201 bp, Homo sapiens; identical to SEQ ID NO: 416

SEQ ID NO: 20096 - DNA, 201 bp, Homo sapiens; identical to SEQ ID NO: 415

SEQ ID NO: 20097 - DNA, 201 bp, Homo sapiens; identical to SEQ ID NO: 414

SEQ ID NO: 20098 - DNA, 201 bp, Homo sapiens
tccagcctgggcaacagagcaagacatttctcctaaaaaaaaataaggccaggcagggtggctcatgcctctaatcacagcactttgggaaaccaaggcargaggactgcttgggtccaggagttcaagaccagcctgggcaacaatagtgagactccatcgctacaaaaaattttacaaaaattagccaggtgtgttaac

SEQ ID NO: 20099 - DNA, 201 bp, Homo sapiens; identical to SEQ ID NO: 4619

SEQ ID NO: 20100 - DNA, 201 bp, Homo sapiens; identical to SEQ ID NO: 4620

SEQ ID NO: 20101 - DNA, 201 bp, Homo sapiens; identical to SEQ ID NO: 4621

SEQ ID NO: 20102 - DNA, 201 bp, Homo sapiens; identical to SEQ ID NO: 4622

SEQ ID NO: 20103 - DNA, 201 bp, Homo sapiens; identical to SEQ ID NO: 4623

SEQ ID NO: 20104 - DNA, 201 bp, Homo sapiens; identical to SEQ ID NO: 402

SEQ ID NO: 20105 - DNA, 201 bp, Homo sapiens; identical to SEQ ID NO: 401

SEQ ID NO: 20106 - DNA, 201 bp, Homo sapiens; identical to SEQ ID NO: 400

SEQ ID NO: 20107 - DNA, 201 bp, Homo sapiens; identical to SEQ ID NO: 397

SEQ ID NO: 20108 - DNA, 201 bp, Homo sapiens; identical to SEQ ID NO: 396

SEQ ID NO: 20109 - DNA, 201 bp, Homo sapiens; identical to SEQ ID NO: 4629

SEQ ID NO: 20110 - DNA, 201 bp, Homo sapiens; identical to SEQ ID NO: 4630

SEQ ID NO: 20111 - DNA, 100 bp, Homo sapiens; identical to SEQ ID NO: 4631

SEQ ID NO: 20112 - DNA, 201 bp, Homo sapiens
aacagatgaaaaaagatataccatgcagtcaccaaaagacagctgaagtggctatactaatagcagataaaatggactttaaattagacaagataggccasgcacggtagctcacgcctgtaatcccagcactttgggaggccgaggtgggcggatcacgaggtcaggagtttgagaccagtctggccaacatagtgaaac

SEQ ID NO: 20113 - DNA, 201 bp, Homo sapiens
tcaccactcatgggagatggcctcttctgcagtgatccgctggtcttgctccacctccatcagccttgtgaccaggtctttggctgtggacaaaaccaagraggggatagtcatgggcaccccatctcaatgtctagaggtgataaatgggctgggggacagaagcagaataccacagaggaagatgagagcaggacaccc

SEQ ID NO: 20114 - DNA, 201 bp, Homo sapiens
atggagagtcaaactcatagtcaccagccaggatcttgcggaagagattcttatcatggttctcataatcatcttcttccacctcctcatagaaaggtggrttgcctgaaagcctgcatgggggaagggtcacacagaaaggccacagacacatgcccccaccccatctgactgcaagcctgcttgtccatctgtccactc

SEQ ID NO: 20115 - DNA, 201 bp, Homo sapiens
acccagccttgcctgacaggcccggcactcacgtcttgatgacctgtcccaaatcatatctgtcagtcacctccgatggctggttatagttcttcttgtcrcccagagtcacacacccaaacggcattgccaggctctaacctgcgggcacaatggggtctggcttagctgtactactctccacttccccacaacataggg

SEQ ID NO: 20116 - DNA, 201 bp, Homo sapiens
aacatctcctccatgaactcatggctcctggcggccttaccctaccctaaggaaaggtctccctggctgtctctagcctggagttcaggggcccttggggyccatgagagagatcttcctaacattgactctgtagttgggggtggtggctacatgctgatgcctccctaaaatgacaggtatgaagggtaatcctactgc

SEQ ID NO: 20117 - DNA, 201 bp, Homo sapiens
ggccacagtggtaacccaggacaacagctcctgaagcatcagagataactcagctccagggacctggagcccactcctgactcaaggccacccctcaagaragccctactctcggccaggcacagtggctcacgcctgtaatcccagcactttgggaggccaaggcgggtggatcaagcggtcaagagatcaagaccaccc

SEQ ID NO: 20118 - DNA, 201 bp, Homo sapiens
cccaggtgtccaccttcaacctttacagcggaagaagggcaatgggaggaagccagagtacacagcagacactgacaggatccctgaggactacagcccaygggtcctaggtttgtttctcattgctaccaggcctcgccctctacaacaggggtgcccatgccccctgaggtttgggaggtaggacagcccagctggctt

SEQ ID NO: 20119 - DNA, 201 bp, Homo sapiens
ttcactacctccacaggccatgaaggtggtggaaatgtctctgaaaggcctggcagcctgaagaccccaggtgtccaccttcaacctttacagcggaagargggcaatgggaggaagccagagtacacagcagacactgacaggatccctgaggactacagcccacgggtcctaggtttgtttctcattgctaccaggcct

SEQ ID NO: 20120 - DNA, 201 bp, Homo sapiens
ggcttagctgtactactctccacttccccacaacataggggctgcttttgggagaccccaacctggctcaggccaagctaggggcagagaccataccaggrggggctagaggataggcaggcttagatcctacccctgcttttctggctagacatccagctactcagcttggctgcctgaagtgcaacagcctacatatga

SEQ ID NO: 20121 - DNA, 201 bp, Homo sapiens
taggagtggggcagggtgagggcaggaagagcagtctctgggtgtcacactcaccctcacctgtttgtctgcccttacacctcaggctggtcccgaaagtrgggctctgtccacaaaacccctgcctggacagtccttgacctacaagttgcaggcatgtgtctggccattggtcagactcactgttctcacgaccacagg

SEQ ID NO: 20122 - DNA, 201 bp, Homo sapiens
agttgctgaaaggtggaatcagggttcaaacaaaggcagcatggctccagagtttgccccttagttccatctgctttacaagagatggggagcaatgacayggctggggccccatggcctatctcctgtgtttgctgagaggggccacagtacgcacttcttgagagacacacagtacacagccagctgttccaccgctga

SEQ ID NO: 20123 - DNA, 201 bp, Homo sapiens
gtcagactgagccacagcactaatctaacacaaagcactgcccaacccctcaactcactctcattcctactttgacacctgagcccaacaagtaccaggtrgcactgtggagggtcctgcagagaatgcaaggaagtgactatttcctcctgcctgtcctgcaggcactggtgacttgagagggcatgcagaaagccccag

SEQ ID NO: 20124 - DNA, 201 bp, Homo sapiens
tcctccagctgccccagggagtcagctgtgccatcaggtcccatggccttgctcaggagaccagagtgaacatgacaaaaggagagccacttctccttcarcctctgttcactgctaagttaccttgcttctggaggaaaacaaatccttcctcagcttgtcagccacctcccctgaggccttccgtgcctcttttagatt

SEQ ID NO: 20125 - DNA, 201 bp, Homo sapiens
agccaggaagagcagaggggagcatcagtgtccacatgttgggggatacctctgtgatctgtccacccctagtggacaagccacatattcaggccaatgcscagtaaggactggtaacaaatttctgtaagtcctccagctgccccagggagtcagctgtgccatcaggtcccatggccttgctcaggagaccagagtgaa

SEQ ID NO: 20126 - DNA, 201 bp, Homo sapiens
ccaggacaggtaaagaggtagaatagtggaagggaagttaaagtagggcccctgtgatcagtctccatagcagaagtttctatcacttccttggcctcatygctctatgttggtctcattccctctgggcatcagctgactcaccagggacacacaataggaatggccaaggaccttgggcgactactcctcctctccacc

SEQ ID NO: 20127 - DNA, 201 bp, Homo sapiens
cctgccatgggtccagttagttcatcaacccaggactcaagcaggttccagccaaactcagcagctgagccctctcccgaagatattcagtcccatcaggyaaccccctcccatcttggttcctgggcaagaagctgcactcagagacaagaggctcacctggtctaggtgaacagcttcagtcacctcccttccctctct

SEQ ID NO: 20128 - DNA, 201 bp, Homo sapiens
cctgtggatgcaccatgccagaagtaaaagcagctgtgctgaccgaatcaggttccaggagccctcctactccagatgtggtacaaaaataggcctctgaygctgtcacatttgaggcctgtgctctccagccagctgagaggtacccaggagccaggaagagcagaggggagcatcagtgtccacatgttgggggatacc

SEQ ID NO: 20129 - DNA, 201 bp, Homo sapiens
gcctagaagcaaaggctgcttcctacatcctgcagcctgtggatgcaccatgccagaagtaaaagcagctgtgctgaccgaatcaggttccaggagccctyctactccagatgtggtacaaaaataggcctctgacgctgtcacatttgaggcctgtgctctccagccagctgagaggtacccaggagccaggaagagcag

SEQ ID NO: 20130 - DNA, 201 bp, Homo sapiens
acacatacacacaattaaaatattcaacaataacgtagaagtgggaaaagaatgttagtattctaagctctttgagttgcctgggaaaatgagaaaggtgytgattaaccttgaaattggtaagttaaggatacataccttaatttctaggataaccacttataaatggaaatggggtatataacgacccaactaactgag

SEQ ID NO: 20131 - DNA, 201 bp, Homo sapiens
gccaatatggcccttttcttatgggatggatgggtacagtatggaagggcaaggggaagaagtgatttgcctctattttacaactccccaaaccaaggtgwtgactggagcagaaccagaagataagcccagaatggggagtccagttctggggcaatacctccctatgaattctgtacccataaaacctgaggacctact

SEQ ID NO: 20132 - DNA, 201 bp, Homo sapiens
caggtccggcttcgtagacgcgcccccgcgcctccgcttgcttcaaatttggctccgcagcacgacttcctggagcgggccggaagtgacaacacaaaacyttgggcggagcgtgaatacttcgcctggattggacaaattctcggatgggcggaactatgggcggggcttagcggccccgaggccgtagagaatcctggg

SEQ ID NO: 20133 - DNA, 201 bp, Homo sapiens
caacacagagcagcatagaatctttgtgcattgctcaccctacaccctctccctagctcagggaagctatctttggctatgagcagggtctgtccttgcgstggctggcccaggtagattccagctctatgcctaaatcaagagtaaggctcctcggtcaacaggagtcaaaaacagcagcccttacttgagctctcagcc

SEQ ID NO: 20134 - DNA, 201 bp, Homo sapiens
aggagcctccctcaggaaactggggagtttaaccctacttcctcatcccagaaaaagcaactcaatgtggctctgaggcacctgggcctctgatagaagtragctgtagaaagagggagttcctcttcatttcattgttgaactgagcagaaaatctgcccctgtaaagggcaaacctccaaatcagattatgagttattg

SEQ ID NO: 20135 - DNA, 201 bp, Homo sapiens
aggaatccatgcaggggctggggccggccctgccactggcctgcccaccactcacacacatacacacaggagacgagactgctctcccgtgacccctagtwatgccccactgggatgtgggggcatgggggagcgagggcatcatgccagtgactctatgtacagtgagaagcccctcatccactctcccaccctcctgcc

SEQ ID NO: 20136 - DNA, 201 bp, Homo sapiens
agcctttgtggagactctgctcagcccttctatgtggcatccagggactaccaggcagagcctctgggctgccctgagctctaggtacctgcaccccttcyaggcctcaaagatggggctgctgggtgtgagggggaccctggcctctcccaccctcccctggaccctgctcaccactcatgggagatggcctcttctgca

SEQ ID NO: 20137 - DNA, 201 bp, Homo sapiens
gtggcaggttcaaggtttcctgcagcatcgttagcttctttttcaggctcttggggagggaaagaaaagtgtgtgagagaaaggctgaggcatcaagtccrgagataatgcagaggacatgagcagcatgcatgaaaggccagcccactgggaacagagcaaggcctgatacctcatcattaggctcaggaggccaagccc

SEQ ID NO: 20138 - DNA, 201 bp, Homo sapiens
tggaacaagatcaggatctctgatgcctcactaggaggcaggagggataatgagtagaatcccaagggtggctccgaagtacctcagtcctggaccaggartgacaaggctctggcaagaccgtgccctcccaaaagtccagtcctgccaaaggttagactgtgcttcttctagaaagctcttaccttcctggggcctttg

SEQ ID NO: 20139 - DNA, 201 bp, Homo sapiens
ggaggagagtgttgtacatgggtctgactacctgcctgacatgcatgtcaggcctgttctcagacctaatttttcaaagtacatcctttagagtcaaaagmcctctttactcctgcaggtaccccaagttggggctgctggtttcgtggtcactgaagtcatattactacagacctacacggttaagtgctcaaaagatac

SEQ ID NO: 20140 - DNA, 201 bp, Homo sapiens
gcaagatcaaagaagagcttattgataatggttcttttgccaacctggatgggagaacaaggtaagagtatgattgtgtagctgggtcatgcgcaaggagragagtgttgtacatgggtctgactacctgcctgacatgcatgtcaggcctgttctcagacctaatttttcaaagtacatcctttagagtcaaaagacctc

SEQ ID NO: 20141 - DNA, 201 bp, Homo sapiens
tagattctcgtactctctgcaatgtggccatggaaagagatgccagaaaagaacacctgcaggtcagactgagccacagcactaatctaacacaaagcacygcccaacccctcaactcactctcattcctactttgacacctgagcccaacaagtaccaggtagcactgtggagggtcctgcagagaatgcaaggaagtga

SEQ ID NO: 20142 - DNA, 201 bp, Homo sapiens
gattcttatcatggttctcataatcatcttcttccacctcctcatagaaaggtgggttgcctgaaagcctgcatgggggaagggtcacacagaaaggccasagacacatgcccccaccccatctgactgcaagcctgcttgtccatctgtccactcacaggatgtacatgatgactccaatggcccagcagtccacagggc

SEQ ID NO: 20143 - DNA, 201 bp, Homo sapiens
ttgacctacaagttgcaggcatgtgtctggccattggtcagactcactgttctcacgaccacaggaaggtgtccagcttggcctggaagagagaaggcackgtcttcaccctcaccctctgcttaaccttggtcttgggcttaacaggcaatgggcggatcatgactgtgtcagtctggaggagctgtcaaggaagaggca

SEQ ID NO: 20144 - DNA, 201 bp, Homo sapiens
atggctcatagacctaaatgtaaaatacaaaacttatcaaactcctaaaagataacataggggaaaatctaggtgaccgtggtttggtgatgacttttttyttcttcttcttcttcttcttctttttttttttttggagacagagtcttgctctgtcacccaggctggagtgcagtggcgcgatcttggctcactgaaaac

SEQ ID NO: 20145 - DNA, 201 bp, Homo sapiens
ttcagctccagagtttgtcagggatagtttgtcaaaaaaattcttcctgtggccaggcgtggtggctcacgcctgtaatcccagcactttgggaggccgargcgggcggatcacctgaggttgggagttcaagaccagcctgaccaacatggagaaaccctgtctctactaaaaatacaaaattagccgggcatagtggcg

SEQ ID NO: 20146 - DNA, 201 bp, Homo sapiens
ccaagaatggcacctccttgccacaaagccccatactcctccagatatgctagagatcagctgggcaacctccactgcagcactcactcactccctgtgcmtcttactccccgtgccaggcccatgctgggtcctggaaaaacaggtgaactcctacctaatagtgggagagggaaatttaggggacttcacccaggctgg

SEQ ID NO: 20147 - DNA, 201 bp, Homo sapiens
ttctttaaaacaattttaaaaaatgttttggctattcagagcctcttgcaattccatataaatttgagaatcagttttcaaatttctgcaaaaaaaaaaaaggccattggaattttgatagggattgtattgaattgtagaatgctttgggggttattgccatctttaaagtcttccaatccatgaacacaagatatccat

SEQ ID NO: 20148 - DNA, 201 bp, Homo sapiens
acttgaactcaggaggtggaggttgcagtgagccgagatcacgccactgcactccagcctacacgacaggagcgagactccatctcaaaaataaaataaartaaaaataaataaataaagtaaaaggatagaagaaaatagagtaggcaaacagaaaatagagtacgcttagaggcgagcttaatttctagtctaaccaaa

SEQ ID NO: 20149 - DNA, 201 bp, Homo sapiens
ctcaggagagcagcccagccaaggactagagtgctaatggaaggttcttcaggctggcctcatcagtagagtatgaaccactttcggaaatatggcccagyctcactgaggtcttagttgagcatcccctctgtgaggtactgggaaggccttgactcttcaaactacctagtacaaaacccacaagtatagccaatatgg

SEQ ID NO: 20150 - DNA, 201 bp, Homo sapiens
cgccactacactccagcctgggtgacagagtgagacttcatctcaaaataaataaataaataaataaataaataaataaataaataaaataaaaaaattamccgagcatggtggtgcacccctacagtcctagctactaggtaggctgaggtggggagatcccttgaactcaggagtttgaggttatagtgagctatgatt

SEQ ID NO: 20151 - DNA, 201 bp, Homo sapiens
tctaaaaaaagaaaagaaaagaaaagaaaagaaaagagaaaagagaagagaagagaagagaagagaaaaaagaaaagaaaagaaaaaagaaaagtgaactygcacaaggcttggagttcagtagaatcagataaattctgggtacctttaagaattctgcatccaagacattctcctcctcctgggcaagatcaaagaaga

SEQ ID NO: 20152 - DNA, 201 bp, Homo sapiens
ctacagctaagaacaatattatgaataaatcacaaaaacataacactgaggaagagaagccagatacaaaaagttatattttgtatgattctatttacacagagtttaaaagtaggcaggccaggcccagtggctcacgtctgtaatcccagcactttgggaggtcgaggcgggtggatcatcaggtcagaagtttgagac

SEQ ID NO: 20153 - DNA, 201 bp, Homo sapiens
tacagctaagaacaatattatgaataaatcacaaaaacataacactgaggaagagaagccagatacaaaaagttatattttgtatgattctatttacacagagtttaaaagtaggcaggccaggcccagtggctcacgtctgtaatcccagcactttgggaggtcgaggcgggtggatcatcaggtcagaagtttgagacc

SEQ ID NO: 20154 - DNA, 201 bp, Homo sapiens
tgcccagactggtcttggacccctgggctcaagcaatccagccacctcccaaagtgctgggattaaaggggtgagccatcatgcctagccaaaaaaacactttttttttttttaagactgagtctcgctctgtcacccaggcgggagtgcagtggtgcaatctcggctcactgcaacctccacctcctgagttcaagcgat

SEQ ID NO: 20155 - DNA, 201 bp, Homo sapiens
cttggccgggcacggtggcgcacacctgtaatcccagcactttgggaggccgaggtgggtggatcacaaggtcaggagatggagaccatcctggctaacayggtgaaaccctgtctctactaaaaatacaaaaaattagccgggcgtggtggcgggcacctgtagtcccagctactcgggaggctgaggcaggagaatagc

SEQ ID NO: 20156 - DNA, 201 bp, Homo sapiens
ccactgtgctccagcctgggcaacagagcaagactctgtctcaaaaaaaaaaaaaagaaaagaaaaaggtaaaaagaaattcatattggatacactatacyaaaactgcagaaagccaaaatcagagaaaattctaaaggtaatgagagtctgaggataaagttccaaagtatgcttaaaggagtaactgataaactaaaa

SEQ ID NO: 20157 - DNA, 201 bp, Homo sapiens
agccaggcaggatcatagtgctaatggggaacaggctctacatatcaatcacaatggggcttatagcccagagagctaggtcaactcccttagaaacagcrcttaagattcacactaaatcctcaacaatcctatgaggcaggtctactactatttccattcaggaagttgagggtcaaagaggccaagaaactggcagca

SEQ ID NO: 20158 - DNA, 201 bp, Homo sapiens
ctttgtaaagcagtttggtaaaaccactaaagtcaaacaaacataccctatgaaccagcaattgcactcctaaatacgtgcctacagaagtgcacatattygtgcatcaggacagtcatacaatgctcatagtagccatatacataatagccaaaaattgaaaacagaccaaataccaccaccaacaggatgtattgtggt

SEQ ID NO: 20159 - DNA, 201 bp, Homo sapiens
tatgaaccagcaattgcactcctaaatacgtgcctacagaagtgcacatattcgtgcatcaggacagtcatacaatgctcatagtagccatatacataatmgccaaaaattgaaaacagaccaaataccaccaccaacaggatgtattgtggtagagtcacacaatggaatattatatagcaatggaaacaaaggagctac

SEQ ID NO: 20160 - DNA, 201 bp, Homo sapiens
gcttgagactgtagtagggttggaattttggaggcccagatgcttcaaagactagagactaacaaatcctttttattattcccacatcagagaagttatcyttgaggaggttatctttgaggtcctcccagagagcagcatccctggtgagttcacccaggcccacctgggctggagtaagtcaacttttgggtttttagg

SEQ ID NO: 20161 - DNA, 201 bp, Homo sapiens
aggcacagcaaactctcttgggtagccagaagcctagcaggtttctatctggaagaaataaaaggacttgttgatgtggtgaaagctcacccttgcccagsctaacggttttgaaatcacatctgtttgtataggtgatcaaggaagcatctatcttcactgagccatcttagtccccctcaggcttagctcagctatcac

SEQ ID NO: 20162 - DNA, 201 bp, Homo sapiens
gtctccacagtgaattacacttggcaaacctggccaaggagacagcctccctttttctggtcccactgtaccccagagcaggttccacctgccccactggwattccagacagcttctcatgcttgcccctgtgggtcacccccttgggtggtaaggccttgggctctgtggtttgagatgatcctccctcaggcatgagcc

SEQ ID NO: 20163 - DNA, 201 bp, Homo sapiens
taagtgcaggacagactatgagggaagactcatggttctgtctgccctctgttgaggaggcccaggctccagtccggaccagggccaaggggcacaccctkacccaggaggatgcaggggcccagaaccaccactgactggtgcaagggtcctgggcagagatagcccagccctgctctgggagggcacacaaaccacccc

SEQ ID NO: 20164 - DNA, 201 bp, Homo sapiens
tcctccaagctctgaactggctctgtgtaccacaaaccttccagacctagtatccaatggaggtagctatgccaggacagctttgtacccctggatgaaasctcccatgtgtctagtctctaactagactattgtgaggatcaagtgagcctctcaaagcccctgcaaatgtttcacagccatgccacagaatcattgaga

SEQ ID NO: 20165 - DNA, 201 bp, Homo sapiens
atcacttccttggcctcatcgctctatgttggtctcattccctctgggcatcagctgactcaccagggacacacaataggaatggccaaggaccttgggcractactcctcctctccaccctgggtcttcctgattcatagtcgactttcctccaagctctgaactggctctgtgtaccacaaaccttccagacctagtat

SEQ ID NO: 20166 - DNA, 201 bp, Homo sapiens
cttatgtggaaatagaaagtgaactcccaggccaggcacagtggctcatgcctgtaatctcagccctttgggaggccaaggtgggaggattgctcgagccyaagagttcaagaccagcctgggtaacatagcaaggccctatctctataaaaatttttttttataaattagggctgggcacggtggcccacgcctgcaatc

SEQ ID NO: 20167 - DNA, 201 bp, Homo sapiens
aaaaagaggaaacctgcccagcccttgaccagcctcacctgaacagtacctgtatgaatgagtatagtccttgtctccacagtgaattacacttggcaaasctggccaaggagacagcctccctttttctggtcccactgtaccccagagcaggttccacctgccccactggaattccagacagcttctcatgcttgcccc

SEQ ID NO: 20168 - DNA, 201 bp, Homo sapiens
attgctcaccctacaccctctccctagctcagggaagctatctttggctatgagcagggtctgtccttgcgctggctggcccaggtagattccagctctaygcctaaatcaagagtaaggctcctcggtcaacaggagtcaaaaacagcagcccttacttgagctctcagcccagggagtattccttggtccaaatgcagc

SEQ ID NO: 20169 - DNA, 201 bp, Homo sapiens
gggcgtggtggcatgctgcctgtaatcccagctacttgggaggcttaggcaggagaattgcttgaacccgggaggtggaggttgcagtgagctgagattgygccactgcactccagcctgggcaacagagtgagacttcatctcaaaaaaaaaaaaaagaaggaaagaaaatcaagatagtatggtgtcagcaaaaataga

SEQ ID NO: 20170 - DNA, 201 bp, Homo sapiens
atagtatggtgtcagcaaaaatagaccaatgaaacagaatagagcccagaaacagacccacacaaatatagtcaactgatctttgacaaaggagcaaaggyaatccaataaagagtagtcttttcacaaatagtcctggaacaattggccatccatatgcaaaaatcaaaataaaaatctagacatatcttagacctttca

SEQ ID NO: 20171 - DNA, 201 bp, Homo sapiens
ctttcacaaaaattaactcaaaatggctcatagacctaaatgtaaaatacaaaacttatcaaactcctaaaagataacataggggaaaatctaggtgaccrtggtttggtgatgacttttttcttcttcttcttcttcttcttctttttttttttttggagacagagtcttgctctgtcacccaggctggagtgcagtggc

SEQ ID NO: 20172 - DNA, 201 bp, Homo sapiens
tgggcacagacaccatccttgatgttcttatcagaagcagcattgccagaaatcctggaaagggtgcaagtgtgtctggatctgagagaatgagcctttgkggagactctgctcagcccttctatgtggcatccagggactaccaggcagagcctctgggctgccctgagctctaggtacctgcaccccttctaggcctca

SEQ ID NO: 20173 - DNA, 201 bp, Homo sapiens
cctgtattcccagcactttggaaggccaaggcaggaggattgctttaggccaggagtttgagaccagcctggctaacatagcgagaccttgtctctaaaamcaataataaaataaaataaaataaaacagatgaaaaaagatataccatgcagtcaccaaaagacagctgaagtggctatactaatagcagataaaatgga

SEQ ID NO: 20174 - DNA, 201 bp, Homo sapiens
ggtgatggtgaggaataatgagacaagagaaggggtttgcacagattgagtgctcaggtgagggaacaagaggtagctggaaccaaagccatggccaagcmtaggcaaccctcactgccccatcagccactcagagctaacagcacagggcctgcagagctgtcttagctatccccctaccagcccatggacagtgccagc

SEQ ID NO: 20175 - DNA, 201 bp, Homo sapiens
tcaaccataagtacctctatgataactccctattttccaaattctcaatgagtgtgtttttacttttataacacgggggggggggggggggggggggggtkgggagtgaagttttattctattaaaactacagccgacaggattcttccagcccacccagacctggcagggctccccacctcctgtcatacaaggagaacc

SEQ ID NO: 20176 - DNA, 201 bp, Homo sapiens
cctctccagcccagacccaccccttctggcatcactgcattctctctaacttgcattccaatacgtttgccttgaaaggtgatggtgaggaataatgagamaagagaaggggtttgcacagattgagtgctcaggtgagggaacaagaggtagctggaaccaaagccatggccaagcctaggcaaccctcactgccccatc

SEQ ID NO: 20177 - DNA, 201 bp, Homo sapiens
ctgaacagtacctgtatgaatgagtatagtccttgtctccacagtgaattacacttggcaaacctggccaaggagacagcctccctttttctggtcccacygtaccccagagcaggttccacctgccccactggaattccagacagcttctcatgcttgcccctgtgggtcacccccttgggtggtaaggccttgggctct

SEQ ID NO: 20178 - DNA, 201 bp, Homo sapiens
acaggagcaggacctgctgacaggatcagtgggctggtcatgtcagctcccagtcgtaggagtggggcagggtgagggcaggaagagcagtctctgggtgycacactcaccctcacctgtttgtctgcccttacacctcaggctggtcccgaaagtggggctctgtccacaaaacccctgcctggacagtccttgacctac

SEQ ID NO: 20179 - DNA, 201 bp, Homo sapiens
acgctcgtaatcccagcactttagtcccagctacccaggaggctgaggcaggatcacatcacctgagcccaggaggttgaggctgcagtgagctgtgatcrcaccactgcactccagcctgggcaacagaatgaggccctatctcaaaacaaacaaaccaacaaacaaaccaacaaacaaacacaagaatagactgtgctg

SEQ ID NO: 20180 - DNA, 201 bp, Homo sapiens
gctcgtaatcccagcactttagtcccagctacccaggaggctgaggcaggatcacatcacctgagcccaggaggttgaggctgcagtgagctgtgatcacrccactgcactccagcctgggcaacagaatgaggccctatctcaaaacaaacaaaccaacaaacaaaccaacaaacaaacacaagaatagactgtgctggt

SEQ ID NO: 20181 - DNA, 201 bp, Homo sapiens
ggccctgttggcttggccaaaagctgtcctttaggcaacattctgggctttgactggggttgggagagatgatagtcgaagctcaggggccctcagagatraggactctgataacacccccattttaagctggaatcccaaagactacactttcaaggtaaggatcaaccagaaataaaagtaagtaagggtacaaaaata

SEQ ID NO: 20182 - DNA, 201 bp, Homo sapiens
agaacgagactccatctcaaaaaaaaaattaggcaagacagactttgaattaaagttacaagagacaaagaaggacaaagaagaacatttaaaaaaagttmaatcctgcaagaagaaacaattataaactccagcctgggcgacacagcacgatcctgtttcaaaaaaaaaaaaaaattattccaaacaaaaactttactt

SEQ ID NO: 20183 - DNA, 201 bp, Homo sapiens; identical to SEQ ID NO: 7966

SEQ ID NO: 20184 - DNA, 201 bp, Homo sapiens; identical to SEQ ID NO: 7967

SEQ ID NO: 20185 - DNA, 201 bp, Homo sapiens; identical to SEQ ID NO: 7968

SEQ ID NO: 20186 - DNA, 201 bp, Homo sapiens; identical to SEQ ID NO: 20112

SEQ ID NO: 20187 - DNA, 201 bp, Homo sapiens; identical to SEQ ID NO: 20113

SEQ ID NO: 20188 - DNA, 201 bp, Homo sapiens; identical to SEQ ID NO: 20114

SEQ ID NO: 20189 - DNA, 201 bp, Homo sapiens; identical to SEQ ID NO: 20115

SEQ ID NO: 20190 - DNA, 201 bp, Homo sapiens; identical to SEQ ID NO: 7969

SEQ ID NO: 20191 - DNA, 201 bp, Homo sapiens; identical to SEQ ID NO: 7971

SEQ ID NO: 20192 - DNA, 201 bp, Homo sapiens; identical to SEQ ID NO: 7972

SEQ ID NO: 20193 - DNA, 201 bp, Homo sapiens; identical to SEQ ID NO: 20120

SEQ ID NO: 20194 - DNA, 201 bp, Homo sapiens; identical to SEQ ID NO: 20130

SEQ ID NO: 20195 - DNA, 201 bp, Homo sapiens; identical to SEQ ID NO: 20132

SEQ ID NO: 20196 - DNA, 201 bp, Homo sapiens; identical to SEQ ID NO: 20133

SEQ ID NO: 20197 - DNA, 201 bp, Homo sapiens; identical to SEQ ID NO: 20134

SEQ ID NO: 20198 - DNA, 201 bp, Homo sapiens; identical to SEQ ID NO: 20135

SEQ ID NO: 20199 - DNA, 201 bp, Homo sapiens; identical to SEQ ID NO: 20136

SEQ ID NO: 20200 - DNA, 201 bp, Homo sapiens; identical to SEQ ID NO: 20142

SEQ ID NO: 20201 - DNA, 201 bp, Homo sapiens; identical to SEQ ID NO: 7973

SEQ ID NO: 20202 - DNA, 201 bp, Homo sapiens; identical to SEQ ID NO: 7974

SEQ ID NO: 20203 - DNA, 201 bp, Homo sapiens; identical to SEQ ID NO: 7975

SEQ ID NO: 20204 - DNA, 201 bp, Homo sapiens
tctgttgctttgcttacaccattccctctggcaagagtgcccttcccccaaaagcctcccgtcagattcctatttgtcacggcagagttatttataacatwaaaaaaaattcagcaactacctaaatgtccaacaacaggtgactcgccagctcaactgtgtccactcaatggtaggaagtgtgggcactggcaagagctc

SEQ ID NO: 20205 - DNA, 201 bp, Homo sapiens; identical to SEQ ID NO: 20148

SEQ ID NO: 20206 - DNA, 201 bp, Homo sapiens
gaacaaactctatcattccttcatctgggttgcttgggctcagggaatacaaatgcatttcatcagcattattccagacagggtttaagccgtcttgcgargcacagcagagacaaaggagaggctttgaagatcgtcactgactgcatgtctgccaccatgggcacaaccctgcactcctccactggggagaagcatgtg

SEQ ID NO: 20207 - DNA, 201 bp, Homo sapiens
agcattagggaacaaactctatcattccttcatctgggttgcttgggctcagggaatacaaatgcatttcatcagcattattccagacagggtttaagccrtcttgcgaggcacagcagagacaaaggagaggctttgaagatcgtcactgactgcatgtctgccaccatgggcacaaccctgcactcctccactggggag

SEQ ID NO: 20208 - DNA, 201 bp, Homo sapiens
ataatacccggtcagtgtgacactggggctacagcaagctctgcactgaggctgcgctgaaattgctctgcctctgctgactgtgcatgttttccctccaygccaattagcacttgctgtgtgcagggcctgagctagggcctgggggtacctagatgctccccgacctgaaggcactcacagcctcaaggtagtggagaa

SEQ ID NO: 20209 - DNA, 201 bp, Homo sapiens
ccaggaagtcaccatactaatgccaaacttagtgtagacacccaactggcatagcgcactgcagcccagagctcctgaactcaaacgatcctcccaccgcwgctgggattacaggcacccgcaccatgcccagctgttctgtcacccaggctggaatgcagtggcacccaggctggaatgcagtggaatgatcacagctca

SEQ ID NO: 20210 - DNA, 201 bp, Homo sapiens
gcccactactgatcagcacaggagttttgacctgcttcgtctctgaccttggttgcttcacccctcctttaggcaacctgatgagctctagctcccaggargtcaccatactaatgccaaacttagtgtagacacccaactggcatagcgcactgcagcccagagctcctgaactcaaacgatcctcccaccgcagctggg

SEQ ID NO: 20211 - DNA, 201 bp, Homo sapiens; identical to SEQ ID NO: 20156

SEQ ID NO: 20212 - DNA, 201 bp, Homo sapiens; identical to SEQ ID NO: 20158

SEQ ID NO: 20213 - DNA, 201 bp, Homo sapiens; identical to SEQ ID NO: 20159

SEQ ID NO: 20214 - DNA, 201 bp, Homo sapiens; identical to SEQ ID NO: 20160

SEQ ID NO: 20215 - DNA, 201 bp, Homo sapiens; identical to SEQ ID NO: 7978

SEQ ID NO: 20216 - DNA, 201 bp, Homo sapiens; identical to SEQ ID NO: 7979

SEQ ID NO: 20217 - DNA, 201 bp, Homo sapiens; identical to SEQ ID NO: 7980

SEQ ID NO: 20218 - DNA, 201 bp, Homo sapiens; identical to SEQ ID NO: 20161

SEQ ID NO: 20219 - DNA, 201 bp, Homo sapiens; identical to SEQ ID NO: 20168

SEQ ID NO: 20220 - DNA, 201 bp, Homo sapiens; identical to SEQ ID NO: 7982

SEQ ID NO: 20221 - DNA, 201 bp, Homo sapiens; identical to SEQ ID NO: 7983

SEQ ID NO: 20222 - DNA, 201 bp, Homo sapiens; identical to SEQ ID NO: 20172

SEQ ID NO: 20223 - DNA, 201 bp, Homo sapiens; identical to SEQ ID NO: 20173

SEQ ID NO: 20224 - DNA, 201 bp, Homo sapiens; identical to SEQ ID NO: 7986

SEQ ID NO: 20225 - DNA, 201 bp, Homo sapiens; identical to SEQ ID NO: 7989

SEQ ID NO: 20226 - DNA, 201 bp, Homo sapiens
aagagaggaggccaagtggaaggggtttgtatttttcacccccatggcccagacccaacacccaacaatggagagctctcctctcagcaacacaggatctsagctcttcctcaggtacacttaggccatggaagggcatgggagctccacaacagccatttccctggagacatggctccctccactctctgcagaggaact

SEQ ID NO: 20227 - DNA, 201 bp, Homo sapiens; identical to SEQ ID NO: 20182

SEQ ID NO: 20228 - DNA, 201 bp, Homo sapiens; identical to SEQ ID NO: 13621

SEQ ID NO: 20229 - DNA, 201 bp, Homo sapiens; identical to SEQ ID NO: 13627

SEQ ID NO: 20230 - DNA, 201 bp, Homo sapiens; identical to SEQ ID NO: 13628

SEQ ID NO: 20231 - DNA, 201 bp, Homo sapiens; identical to SEQ ID NO: 13629

SEQ ID NO: 20232 - DNA, 201 bp, Homo sapiens; identical to SEQ ID NO: 13675

SEQ ID NO: 20233 - DNA, 201 bp, Homo sapiens; identical to SEQ ID NO: 13685

SEQ ID NO: 20234 - DNA, 201 bp, Homo sapiens; identical to SEQ ID NO: 13704

SEQ ID NO: 20235 - DNA, 201 bp, Homo sapiens; identical to SEQ ID NO: 13725

SEQ ID NO: 20236 - DNA, 201 bp, Homo sapiens; identical to SEQ ID NO: 13743

SEQ ID NO: 20237 - DNA, 201 bp, Homo sapiens; identical to SEQ ID NO: 13744

SEQ ID NO: 20238 - DNA, 201 bp, Homo sapiens; identical to SEQ ID NO: 13745

SEQ ID NO: 20239 - DNA, 201 bp, Homo sapiens; identical to SEQ ID NO: 13746

SEQ ID NO: 20240 - DNA, 201 bp, Homo sapiens; identical to SEQ ID NO: 13747

SEQ ID NO: 20241 - DNA, 201 bp, Homo sapiens; identical to SEQ ID NO: 13748

SEQ ID NO: 20242 - DNA, 201 bp, Homo sapiens; identical to SEQ ID NO: 13749

SEQ ID NO: 20243 - DNA, 201 bp, Homo sapiens; identical to SEQ ID NO: 13750

SEQ ID NO: 20244 - DNA, 201 bp, Homo sapiens; identical to SEQ ID NO: 13751

SEQ ID NO: 20245 - DNA, 201 bp, Homo sapiens; identical to SEQ ID NO: 13752

SEQ ID NO: 20246 - DNA, 201 bp, Homo sapiens; identical to SEQ ID NO: 13752

SEQ ID NO: 20247 - DNA, 201 bp, Homo sapiens; identical to SEQ ID NO: 13754

SEQ ID NO: 20248 - DNA, 201 bp, Homo sapiens; identical to SEQ ID NO: 13755

SEQ ID NO: 20249 - DNA, 201 bp, Homo sapiens; identical to SEQ ID NO: 13756

SEQ ID NO: 20250 - DNA, 201 bp, Homo sapiens; identical to SEQ ID NO: 13780

SEQ ID NO: 20251 - DNA, 201 bp, Homo sapiens; identical to SEQ ID NO: 13781

SEQ ID NO: 20252 - DNA, 201 bp, Homo sapiens; identical to SEQ ID NO: 13805

SEQ ID NO: 20253 - DNA, 201 bp, Homo sapiens; identical to SEQ ID NO: 13806

SEQ ID NO: 20254 - DNA, 201 bp, Homo sapiens; identical to SEQ ID NO: 13807

SEQ ID NO: 20255 - DNA, 201 bp, Homo sapiens; identical to SEQ ID NO: 13808

SEQ ID NO: 20256 - DNA, 201 bp, Homo sapiens; identical to SEQ ID NO: 13809

SEQ ID NO: 20257 - DNA, 201 bp, Homo sapiens; identical to SEQ ID NO: 13810

SEQ ID NO: 20258 - DNA, 201 bp, Homo sapiens; identical to SEQ ID NO: 13838

SEQ ID NO: 20259 - DNA, 201 bp, Homo sapiens; identical to SEQ ID NO: 13838

SEQ ID NO: 20260 - DNA, 201 bp, Homo sapiens; identical to SEQ ID NO: 13840

SEQ ID NO: 20261 - DNA, 201 bp, Homo sapiens; identical to SEQ ID NO: 13841

SEQ ID NO: 20262 - DNA, 201 bp, Homo sapiens; identical to SEQ ID NO: 13842

SEQ ID NO: 20263 - DNA, 201 bp, Homo sapiens; identical to SEQ ID NO: 13850

SEQ ID NO: 20264 - DNA, 201 bp, Homo sapiens; identical to SEQ ID NO: 13853

SEQ ID NO: 20265 - DNA, 201 bp, Homo sapiens; identical to SEQ ID NO: 13857

SEQ ID NO: 20266 - DNA, 201 bp, Homo sapiens; identical to SEQ ID NO: 13860

SEQ ID NO: 20267 - DNA, 201 bp, Homo sapiens; identical to SEQ ID NO: 13871

SEQ ID NO: 20268 - DNA, 201 bp, Homo sapiens; identical to SEQ ID NO: 13872

SEQ ID NO: 20269 - DNA, 201 bp, Homo sapiens; identical to SEQ ID NO: 13873

SEQ ID NO: 20270 - DNA, 201 bp, Homo sapiens; identical to SEQ ID NO: 13874

SEQ ID NO: 20271 - DNA, 201 bp, Homo sapiens; identical to SEQ ID NO: 13875

SEQ ID NO: 20272 - DNA, 201 bp, Homo sapiens; identical to SEQ ID NO: 13876

SEQ ID NO: 20273 - DNA, 201 bp, Homo sapiens; identical to SEQ ID NO: 13877

SEQ ID NO: 20274 - DNA, 201 bp, Homo sapiens; identical to SEQ ID NO: 13878

SEQ ID NO: 20275 - DNA, 201 bp, Homo sapiens; identical to SEQ ID NO: 13879

SEQ ID NO: 20276 - DNA, 201 bp, Homo sapiens; identical to SEQ ID NO: 13880

SEQ ID NO: 20277 - DNA, 201 bp, Homo sapiens; identical to SEQ ID NO: 13881

SEQ ID NO: 20278 - DNA, 201 bp, Homo sapiens; identical to SEQ ID NO: 13882

SEQ ID NO: 20279 - DNA, 201 bp, Homo sapiens; identical to SEQ ID NO: 13883

SEQ ID NO: 20280 - DNA, 201 bp, Homo sapiens; identical to SEQ ID NO: 13884

SEQ ID NO: 20281 - DNA, 201 bp, Homo sapiens; identical to SEQ ID NO: 13885

SEQ ID NO: 20282 - DNA, 201 bp, Homo sapiens; identical to SEQ ID NO: 13886

SEQ ID NO: 20283 - DNA, 201 bp, Homo sapiens; identical to SEQ ID NO: 13887

SEQ ID NO: 20284 - DNA, 201 bp, Homo sapiens; identical to SEQ ID NO: 13937

SEQ ID NO: 20285 - DNA, 201 bp, Homo sapiens; identical to SEQ ID NO: 13938

SEQ ID NO: 20286 - DNA, 201 bp, Homo sapiens; identical to SEQ ID NO: 13939

SEQ ID NO: 20287 - DNA, 201 bp, Homo sapiens; identical to SEQ ID NO: 13940

SEQ ID NO: 20288 - DNA, 201 bp, Homo sapiens; identical to SEQ ID NO: 13941

SEQ ID NO: 20289 - DNA, 201 bp, Homo sapiens; identical to SEQ ID NO: 13942

SEQ ID NO: 20290 - DNA, 201 bp, Homo sapiens; identical to SEQ ID NO: 13943

SEQ ID NO: 20291 - DNA, 201 bp, Homo sapiens; identical to SEQ ID NO: 13944

SEQ ID NO: 20292 - DNA, 201 bp, Homo sapiens; identical to SEQ ID NO: 13945

SEQ ID NO: 20293 - DNA, 201 bp, Homo sapiens; identical to SEQ ID NO: 13957

SEQ ID NO: 20294 - DNA, 201 bp, Homo sapiens; identical to SEQ ID NO: 10884

SEQ ID NO: 20295 - DNA, 201 bp, Homo sapiens; identical to SEQ ID NO: 10885

SEQ ID NO: 20296 - DNA, 201 bp, Homo sapiens; identical to SEQ ID NO: 10886

SEQ ID NO: 20297 - DNA, 201 bp, Homo sapiens; identical to SEQ ID NO: 10894

SEQ ID NO: 20298 - DNA, 201 bp, Homo sapiens; identical to SEQ ID NO: 10902

SEQ ID NO: 20299 - DNA, 201 bp, Homo sapiens; identical to SEQ ID NO: 10967

SEQ ID NO: 20300 - DNA, 201 bp, Homo sapiens; identical to SEQ ID NO: 10968

SEQ ID NO: 20301 - DNA, 201 bp, Homo sapiens; identical to SEQ ID NO: 10984

SEQ ID NO: 20302 - DNA, 201 bp, Homo sapiens; identical to SEQ ID NO: 10985

SEQ ID NO: 20303 - DNA, 201 bp, Homo sapiens; identical to SEQ ID NO: 10986

SEQ ID NO: 20304 - DNA, 201 bp, Homo sapiens; identical to SEQ ID NO: 10987

SEQ ID NO: 20305 - DNA, 201 bp, Homo sapiens; identical to SEQ ID NO: 11024

SEQ ID NO: 20306 - DNA, 201 bp, Homo sapiens; identical to SEQ ID NO: 11026

SEQ ID NO: 20307 - DNA, 201 bp, Homo sapiens; identical to SEQ ID NO: 11035

SEQ ID NO: 20308 - DNA, 201 bp, Homo sapiens; identical to SEQ ID NO: 11036

SEQ ID NO: 20309 - DNA, 201 bp, Homo sapiens; identical to SEQ ID NO: 11062

SEQ ID NO: 20310 - DNA, 201 bp, Homo sapiens; identical to SEQ ID NO: 11063

SEQ ID NO: 20311 - DNA, 201 bp, Homo sapiens; identical to SEQ ID NO: 11064

SEQ ID NO: 20312 - DNA, 201 bp, Homo sapiens; identical to SEQ ID NO: 11065

SEQ ID NO: 20313 - DNA, 201 bp, Homo sapiens; identical to SEQ ID NO: 11066

SEQ ID NO: 20314 - DNA, 201 bp, Homo sapiens; identical to SEQ ID NO: 11067

SEQ ID NO: 20315 - DNA, 201 bp, Homo sapiens; identical to SEQ ID NO: 2844

SEQ ID NO: 20316 - DNA, 201 bp, Homo sapiens; identical to SEQ ID NO: 7246

SEQ ID NO: 20317 - DNA, 201 bp, Homo sapiens; identical to SEQ ID NO: 7247

SEQ ID NO: 20318 - DNA, 201 bp, Homo sapiens; identical to SEQ ID NO: 7248

SEQ ID NO: 20319 - DNA, 201 bp, Homo sapiens; identical to SEQ ID NO: 7249

SEQ ID NO: 20320 - DNA, 201 bp, Homo sapiens
cgggagggaggggacgcgtgtttacaaacaagggggcgggagcgcaaggaaaagagcaccgggggagggtgtgggggaggggtcgcagataaagcggtcamtggctcgcctgcccttctgctggggcactcaccccgcccgctgtcgcccatcccgtcccgtccagcctcccctggctccggctccggggtttgttgttct

SEQ ID NO: 20321 - DNA, 201 bp, Homo sapiens
tcgggagggaggggacgcgtgtttacaaacaagggggcgggagcgcaaggaaaagagcaccgggggagggtgtgggggaggggtcgcagataaagcggtcmctggctcgcctgcccttctgctggggcactcaccccgcccgctgtcgcccatcccgtcccgtccagcctcccctggctccggctccggggtttgttgttc

SEQ ID NO: 20322 - DNA, 201 bp, Homo sapiens
aacgcccaaagtcctgaggtttaagaggaatcgtgcccttcccaggcccgcgacctccggtgcccaaggcctcaagcggtcacagctaggagggcggaagytccccttccccgccccgccccgggggggagggtgctaaggccctcgggagggaggggacgcgtgtttacaaacaagggggcgggagcgcaaggaaaagag

SEQ ID NO: 20323 - DNA, 201 bp, Homo sapiens
cccaaaaacagcgtaactcctcattgtggtgagaggagggagttgacaaggagaggaggatagttcaggtgaggaaaattttccaaccaatccatttgaaygaataccaggtcatcccaaagccacacctgtctcgtgggtggggcagcacgtggggtagaccatcgagcccctctattcccagcgtaaagccaggtagcc

SEQ ID NO: 20324 - DNA, 201 bp, Homo sapiens
cgtgccggacccagcccactccacccatccccaagttcagagacaccctgctgtcaaacaacagtgtaactccggctggtccgatggtagtgggttatcaraacttattaacatttgtgtcactaaaattggtatacaacctcccactgctatatttgactggctaaaaaaacccaaaaacagcgtaactcctcattgtgg

SEQ ID NO: 20325 - DNA, 201 bp, Homo sapiens
aaaaagaaaatgagtcttcaaacatccaactagagactttaattctctaataccccaccgtgccggacccagcccactccacccatccccaagttcagagrcaccctgctgtcaaacaacagtgtaactccggctggtccgatggtagtgggttatcagaacttattaacatttgtgtcactaaaattggtatacaacctc

SEQ ID NO: 20326 - DNA, 201 bp, Homo sapiens
ggaaaggcaaggggtctcataaagaccacaggcctgacaaggttagaggattggaaggtcaatgggccatggggaagttcacacaaggatctggggttacmaggaaaacaagaaaatgaaagtggccaggcagtaagttggtcacaacctctcacctgggggctgctgacaggcccggagaatcctgggggagctggaggg

SEQ ID NO: 20327 - DNA, 201 bp, Homo sapiens; identical to SEQ ID NO: 2842

SEQ ID NO: 20328 - DNA, 201 bp, Homo sapiens; identical to SEQ ID NO: 2860

SEQ ID NO: 20329 - DNA, 201 bp, Homo sapiens
ccgaggaggcggtctcctccggcctgttagcccgcctcgcccaccctcccctcaaatcacctccacactcgcgcatgcgtgtcagtgcaggatggattcgycgctaccggagtgccgccatattggtaaaggcattagggcgaaggtggaacggaacttcctgttctcgcgggatctaaaggcgggactgccacgtccaag

SEQ ID NO: 20330 - DNA, 201 bp, Homo sapiens; identical to SEQ ID NO: 7253

SEQ ID NO: 20331 - DNA, 201 bp, Homo sapiens; identical to SEQ ID NO: 7254

SEQ ID NO: 20332 - DNA, 201 bp, Homo sapiens; identical to SEQ ID NO: 7255

SEQ ID NO: 20333 - DNA, 201 bp, Homo sapiens; identical to SEQ ID NO: 7256

SEQ ID NO: 20334 - DNA, 201 bp, Homo sapiens; identical to SEQ ID NO: 7257

SEQ ID NO: 20335 - DNA, 201 bp, Homo sapiens; identical to SEQ ID NO: 7258

SEQ ID NO: 20336 - DNA, 201 bp, Homo sapiens; identical to SEQ ID NO: 7259

SEQ ID NO: 20337 - DNA, 201 bp, Homo sapiens; identical to SEQ ID NO: 7260

SEQ ID NO: 20338 - DNA, 201 bp, Homo sapiens; identical to SEQ ID NO: 7262

SEQ ID NO: 20339 - DNA, 201 bp, Homo sapiens; identical to SEQ ID NO: 7263

SEQ ID NO: 20340 - DNA, 201 bp, Homo sapiens; identical to SEQ ID NO: 7264

SEQ ID NO: 20341 - DNA, 201 bp, Homo sapiens; identical to SEQ ID NO: 7265

SEQ ID NO: 20342 - DNA, 201 bp, Homo sapiens; identical to SEQ ID NO: 7266

SEQ ID NO: 20343 - DNA, 201 bp, Homo sapiens; identical to SEQ ID NO: 7267

SEQ ID NO: 20344 - DNA, 201 bp, Homo sapiens
ttcttgtcgtggagaaatttgtgagacatgtgaaaggaggacatggtcacagtcatggacatggacacgctcacagtcatacacgtggaagtcatggacayggaagacaaggtgagcccaggaacaactttcctgaaagctgacttgcctgcctcagaatctcctcatcttatggccctcaggagggagaggacatgttgg

SEQ ID NO: 20345 - DNA, 201 bp, Homo sapiens
ggaggaaaagggttctttctcctttatgatccctgacctttcgatattcccccaaatacacactcattgtgtcagatattccctcatctggttttcccccmttcttccagaacctcattctcaccacactctggagcaacccggacatggacactcccacagtggtgaggaagagacagatggggatgggagttggggtgc

SEQ ID NO: 20346 - DNA, 201 bp, Homo sapiens
tggccatagccatggctactcccatgagagcctctaccacagaggacatggacatgaccatgagcatagccatggaggctatggggagtctggggctccasgcatcaagcaggacctggatgctgtcactctctgggcttatgtgagtctccaggggatgggagagagaagggctggttctggattgttgggaaactccac

SEQ ID NO: 20347 - DNA, 201 bp, Homo sapiens; identical to SEQ ID NO: 2840

SEQ ID NO: 20348 - DNA, 201 bp, Homo sapiens; identical to SEQ ID NO: 7268

SEQ ID NO: 20349 - DNA, 201 bp, Homo sapiens; identical to SEQ ID NO: 7269

SEQ ID NO: 20350 - DNA, 201 bp, Homo sapiens; identical to SEQ ID NO: 7270

SEQ ID NO: 20351 - DNA, 201 bp, Homo sapiens; identical to SEQ ID NO: 7271

SEQ ID NO: 20352 - DNA, 201 bp, Homo sapiens; identical to SEQ ID NO: 7272

SEQ ID NO: 20353 - DNA, 201 bp, Homo sapiens; identical to SEQ ID NO: 831

SEQ ID NO: 20354 - DNA, 201 bp, Homo sapiens; identical to SEQ ID NO: 7274

SEQ ID NO: 20355 - DNA, 201 bp, Homo sapiens; identical to SEQ ID NO: 830

SEQ ID NO: 20356 - DNA, 201 bp, Homo sapiens; identical to SEQ ID NO: 7276

SEQ ID NO: 20357 - DNA, 201 bp, Homo sapiens
gatggggatgggagttggggtgctggggaaggtccgtctctccctattcctcacctcccgcacttgaggaggaggagtctggaatgcacatctcccttaawgtctcaatgcctccattcccaggccagggccccattctgtctgtgggactgtgggttctcagtggaattgttgcctttcttgtcgtggagaaatttgtga

SEQ ID NO: 20358 - DNA, 201 bp, Homo sapiens; identical to SEQ ID NO: 7277

SEQ ID NO: 20359 - DNA, 201 bp, Homo sapiens; identical to SEQ ID NO: 7278

SEQ ID NO: 20360 - DNA, 201 bp, Homo sapiens; identical to SEQ ID NO: 7279

SEQ ID NO: 20361 - DNA, 201 bp, Homo sapiens; identical to SEQ ID NO: 7281

SEQ ID NO: 20362 - DNA, 201 bp, Homo sapiens; identical to SEQ ID NO: 7282

SEQ ID NO: 20363 - DNA, 201 bp, Homo sapiens; identical to SEQ ID NO: 826

SEQ ID NO: 20364 - DNA, 201 bp, Homo sapiens; identical to SEQ ID NO: 7285

SEQ ID NO: 20365 - DNA, 201 bp, Homo sapiens
cacagtgaccctgaagggcaggtgtcttgggaaagcagatgggatcaaaagggcagaaaatcagatagatgaaaaggacatcaagaatatcagaattagcygggcgtggtggtaggcacctgtaatcccagctactcaggaggctgaggcaggagaattgcttgaacccaggaggcagaggttgcagtgagctgagattgt

SEQ ID NO: 20366 - DNA, 201 bp, Homo sapiens
agtgcaggatggattcgtcgctaccggagtgccgccatattggtaaaggcattagggcgaaggtggaacggaacttcctgttctcgcgggatctaaaggcsggactgccacgtccaagcaaaccgggaaaggagaggatcccggagccggtgagaattctctgttttttctctaccatcctttccaggccttttcctcacc

SEQ ID NO: 20367 - DNA, 201 bp, Homo sapiens
tacacactcattgtgtcagatattccctcatctggttttccccccttcttccagaacctcattctcaccacactctggagcaacccggacatggacactcscacagtggtgaggaagagacagatggggatgggagttggggtgctggggaaggtccgtctctccctattcctcacctcccgcacttgaggaggaggagtc

SEQ ID NO: 20368 - DNA, 201 bp, Homo sapiens
cctcacctcccgcacttgaggaggaggagtctggaatgcacatctcccttaatgtctcaatgcctccattcccaggccagggccccattctgtctgtgggmctgtgggttctcagtggaattgttgcctttcttgtcgtggagaaatttgtgagacatgtgaaaggaggacatggtcacagtcatggacatggacacgctc

SEQ ID NO: 20369 - DNA, 201 bp, Homo sapiens; identical to SEQ ID NO: 7289

SEQ ID NO: 20370 - DNA, 201 bp, Homo sapiens; identical to SEQ ID NO: 7290

SEQ ID NO: 20371 - DNA, 201 bp, Homo sapiens; identical to SEQ ID NO: 7291

SEQ ID NO: 20372 - DNA, 201 bp, Homo sapiens; identical to SEQ ID NO: 2854

SEQ ID NO: 20373 - DNA, 201 bp, Homo sapiens; identical to SEQ ID NO: 7293

SEQ ID NO: 20374 - DNA, 201 bp, Homo sapiens; identical to SEQ ID NO: 829

SEQ ID NO: 20375 - DNA, 100 bp, Homo sapiens
ccacagtgctgatctcagcagctccattttttgtcctcttccttatcccygtggagtcgaactctccccggcatcgctctctacttcagatcttgctcag

SEQ ID NO: 20376 - DNA, 201 bp, Homo sapiens
taaaggcattagggcgaaggtggaacggaacttcctgttctcgcgggatctaaaggcgggactgccacgtccaagcaaaccgggaaaggagaggatcccgragccggtgagaattctctgttttttctctaccatcctttccaggccttttcctcacctaatgagtcgtagagacgagggcccagagagtctgtaaagtgg

SEQ ID NO: 20377 - DNA, 201 bp, Homo sapiens; identical to SEQ ID NO: 2853

SEQ ID NO: 20378 - DNA, 201 bp, Homo sapiens; identical to SEQ ID NO: 7300

SEQ ID NO: 20379 - DNA, 201 bp, Homo sapiens
atcaacaagcatccctgtgcctctgtaaaacctcagcaaaacagtacgtcacatgcctacctcataggatagataggacgcatcagcacagcacctggcayagggcaagtgctggggagagtcagctctggagaccacagacctcactgctattagactctctcatctcagaactcctgctgcttggagtccgaacgcatg

SEQ ID NO: 20380 - DNA, 201 bp, Homo sapiens
tggaaaccctaggcgaggaagagaggagaatgcagtgaaagcaggtgtgggcgctgtggggcagattcccaggaggaaggatcccaggcaggatcacaccragccctgggccctgggtctgagcagcaccagggcaggctccactctgccaggagaacgtccctgtgggctttccagacagctctggggttaaagggtctg

SEQ ID NO: 20381 - DNA, 201 bp, Homo sapiens
tccaaagtgtccctggggtccccgagctccgggctccccatctgctccctgcagggttgagggaaagcagagacaaggacacagggatgggtcatgggtcaggtgttctctatccacaaataccacacacagctgggtgccaggcccagagcccctgctcccactcccagccacaagggcagaggggagctgagggaggac

SEQ ID NO: 20382 - DNA, 201 bp, Homo sapiens
ctgggcgacagagcgagactctgtctcaaaaaacaaaaaaaaacatgatctccctgtgcgccccatcccaaaccctcctctccttcgccaccatgccagcrcacaattccatcatatcacttgccttttcaaacaccatctatgactcttagtttttgggttcaagttcaactccttccataagcagtcaatacttttcag

SEQ ID NO: 20383 - DNA, 201 bp, Homo sapiens
gtctgggagtcacactcacagcagtgcctgggaggcctctctctcctgggaatcccctcagaccagcaggaccatccttccctggggccccagggggaccrgggtcaccctaaaaggaaaggagaggtgatgagccacagccatgctcccaaattaaacagagagctctccagccccccctcaaatctccaactacctgtt

SEQ ID NO: 20384 - DNA, 201 bp, Homo sapiens
cgtcacgggctgctccagagcaggggtaggagacgtcctggtgggctgagacgctgagcagccgcaggaaggtgagctggaccacacccactggggagccstctgagtccacgtaagagaactggaaggagagagagggctggcctcagagggggagagagagggctggcctcagagggagacagagacgggcctcaggag

SEQ ID NO: 20385 - DNA, 201 bp, Homo sapiens
gtgggattccaggtgggcctggttccgaatggacaggatcagacagagacggtcctatcccatgaagcagacaggccccagcagcacccctccccgcctcrgtggggctcccaggtctgagaaggaggcatccagcactggcagctgctccagcacaggcgttcgcacctccagcaccgtccggccttgctgtgtcttcag

SEQ ID NO: 20386 - DNA, 201 bp, Homo sapiens
acccactcctgcttcaccaagaccaatccccctgcaggccctttgcccaccacaccccgactcccgtgcatgcccccttccccagaggctccagggctcaycctgcccaggcagctgcagagcagggcttagaagcagagattctgaagccagactgcctgggcataacccctggctctgcccttcactggccatgtaatc

SEQ ID NO: 20387 - DNA, 201 bp, Homo sapiens
ctctaaccttaggaattctacagtaactcatttccctaaagtcccatctctacccactcagcccctgaaataagaaacagtcatcttagccatccccctgyctccatgccagaggatccctcttccccctaagaaagactcctagagtctacaggcaccatacgcctcaatttcctggccctgggcttcactgtcctcaca

SEQ ID NO: 20388 - DNA, 201 bp, Homo sapiens
agaggtttgggggcagagatctggatgccccggctctacctgccggtaactgctgcctctggtcctggggcggggccaggcagtgggggaagctgccctcsgagctgggcatcgggaaaggggaggctgctcccatgctgggtcaaagcctgcagttggagagggcctccggcctggtgagggggacgcctgccaggtcat

SEQ ID NO: 20389 - DNA, 201 bp, Homo sapiens
actggatgcagagtggacagtccatggacacaatgacagacaaaggagtccaggaatgaccaaagagatagggaagacaaaaggtgacaacactggacagraagtggctcccgggaacagaaataggacatagaaagtaagaccattagacaccaacatggagacgaagtcactcaggaatcaaagaatcatggaaggagg

SEQ ID NO: 20390 - DNA, 201 bp, Homo sapiens
gagcaccctgctcactcaccaagggtccagggcgccctgtgtatcccatggggccagggggtccacggagcgccagctaggggagcagggggacagcagasctgagggacaggcagtgggaacccccagccccagcactctccaaattcacccttcctctcctgatcctcatccactgcccaggattctccccaacctccc

SEQ ID NO: 20391 - DNA, 201 bp, Homo sapiens
tgtaaaacctcagcaaaacagtacgtcacatgcctacctcataggatagataggacgcatcagcacagcacctggcacagggcaagtgctggggagagtcmgctctggagaccacagacctcactgctattagactctctcatctcagaactcctgctgcttggagtccgaacgcatgttcactctgccttgaagcaacag

SEQ ID NO: 20392 - DNA, 201 bp, Homo sapiens
tccccgacaggccctggtgggaatgaagcagagagaacattacccagggtgagactccccacagaccccctctacacctctccagcccttcccttctcacsccctcccaccccccagcttacccgggctcccttctctccactggcaccaggaaagccaggaaatcctagggacccctggtgagaacggagaaggggggaa

SEQ ID NO: 20393 - DNA, 201 bp, Homo sapiens
ggtggagtgggaaggaagagcacatgaggccgtgggcagccaggctcaactcttcccccttcctgtcctagacacacacatacacatgcacacacacacgwgcatacacagggacacgcgccgagggccgattcacagatgtgcagaacagatacagctgtgacagttgtgaaaatactgggtagtctgtacatttggtga

SEQ ID NO: 20394 - DNA, 201 bp, Homo sapiens
tctttactcccatcaggcctcccccaggtcacttgctctgaccaaactccataagccctgggaatcccacaggtgatgatacatggcccagactctccctmtctgttcatcctctgagccacatacctgagcttctgtccccgcagattgcacatagccgtttgccagccccagggccacctggagggggtggacagtgca

SEQ ID NO: 20395 - DNA, 201 bp, Homo sapiens
aggagctgagtgatgatccagtcccagtctcctcactgttcagaaaccctacacgctgcttccttttccctctgaccttccccccaatcgcgtcctacatytcagcttcagcttctttactcccatcaggcctcccccaggtcacttgctctgaccaaactccataagccctgggaatcccacaggtgatgatacatggcc

SEQ ID NO: 20396 - DNA, 201 bp, Homo sapiens
agatagggaaccaggagctgagtgatgatccagtcccagtctcctcactgttcagaaaccctacacgctgcttccttttccctctgaccttccccccaatsgcgtcctacatctcagcttcagcttctttactcccatcaggcctcccccaggtcacttgctctgaccaaactccataagccctgggaatcccacaggtga

SEQ ID NO: 20397 - DNA, 201 bp, Homo sapiens
accttcaccatttagtctgtttccaatctccccctagcaaaacttaaagtcctccctgtttgccaaatacagagatagggaaccaggagctgagtgatgawccagtcccagtctcctcactgttcagaaaccctacacgctgcttccttttccctctgaccttccccccaatcgcgtcctacatctcagcttcagcttctt

SEQ ID NO: 20398 - DNA, 201 bp, Homo sapiens
ccccgtagtgtttgcctacagggaaaggggaggagcaataagaaggttgcatggagacaccttcaccatttagtctgtttccaatctccccctagcaaaahttaaagtcctccctgtttgccaaatacagagatagggaaccaggagctgagtgatgatccagtcccagtctcctcactgttcagaaaccctacacgctgc

SEQ ID NO: 20399 - DNA, 201 bp, Homo sapiens
aatcaaatatcgccctctagaggagagagagcagtccacccttccagagaggtacacagtctgagtgggataagggagaagggcatgtggtctaagacgcstgggcagggcgggtccttaccctccctcttcatgccagtggccaggcacttctgatagcggcagtactgacagcggttccgctggcgcttgtccactgtg

SEQ ID NO: 20400 - DNA, 201 bp, Homo sapiens
gcgaagggagagagaaatcaaatatcgccctctagaggagagagagcagtccacccttccagagaggtacacagtctgagtgggataagggagaagggcaygtggtctaagacgcctgggcagggcgggtccttaccctccctcttcatgccagtggccaggcacttctgatagcggcagtactgacagcggttccgctgg

SEQ ID NO: 20401 - DNA, 201 bp, Homo sapiens
aacagggtaacagggaggagagctgcgaagggagagagaaatcaaatatcgccctctagaggagagagagcagtccacccttccagagaggtacacagtcygagtgggataagggagaagggcatgtggtctaagacgcctgggcagggcgggtccttaccctccctcttcatgccagtggccaggcacttctgatagcgg

SEQ ID NO: 20402 - DNA, 201 bp, Homo sapiens
caggccacagaggcctaaccattaagaaggaaactcaagggccagaacagggtaacagggaggagagctgcgaagggagagagaaatcaaatatcgccctytagaggagagagagcagtccacccttccagagaggtacacagtctgagtgggataagggagaagggcatgtggtctaagacgcctgggcagggcgggtcc

SEQ ID NO: 20403 - DNA, 201 bp, Homo sapiens
cacatccacctcagatgtttgaaagaccttgtttggcagcacctccagtcccaagtagtgttaggaaggttatgaggggaaaggagggggaggggatgtakaacagacctagactgcctcccccaacccccatcacgaaggagagtggattgaccccaacactcacgctgctgccgctacccccggttcccccaggaccct

SEQ ID NO: 20404 - DNA, 201 bp, Homo sapiens
tcacatccacctcagatgtttgaaagaccttgtttggcagcacctccagtcccaagtagtgttaggaaggttatgaggggaaaggagggggaggggatgtwgaacagacctagactgcctcccccaacccccatcacgaaggagagtggattgaccccaacactcacgctgctgccgctacccccggttcccccaggaccc

SEQ ID NO: 20405 - DNA, 201 bp, Homo sapiens
atgaggcaagatgagaaggaagcaaggtcctggaggcaaggccagtgctttgtgctgggggaaggacagagggtgagaaatcaccccaaatcatgggagamcccgacaaattcagagactcaaggccaccgaagagagacaaccagtcctcacaggtatctggggtcccttccaacttgggatatcaagcagatcccttgg

SEQ ID NO: 20406 - DNA, 201 bp, Homo sapiens
ccccatctgccaggtttgagaggaggaaggcctgtcagggccctactctcatgtccatcagcttgggaggcctgccccccagtatccacctctgggggagwtccccatttccactcttcagatgggaagcaaaatgaggcaagatgagaaggaagcaaggtcctggaggcaaggccagtgctttgtgctgggggaaggaca

SEQ ID NO: 20407 - DNA, 201 bp, Homo sapiens
agcagatcggttcctacatctccaccagccccttcaccaccaccaccaccttttttatatttcagtctgactgcagaaggaggtgaagtgtaaaaagagamtctggacagtgacagggcccctccctcttccagagaggcccccatctgccaggtttgagaggaggaaggcctgtcagggccctactctcatgtccatcag

SEQ ID NO: 20408 - DNA, 201 bp, Homo sapiens
aagtgggtcaggagatgggtgagtgagtatattgaaggagggagtggttgagttggtggaaggataatggatagatggtggctgaatggatgcatgcatcyttgtgtgcatgggtagatggggagggtgggtgggtgagtgaatagctggatggaggagttgaagaggatagatgggtggaagcatagatgggtggtttga

SEQ ID NO: 20409 - DNA, 201 bp, Homo sapiens
cctgacaccccagctggacagggcttgcagggtatctggattaagccatacaattctggtaaccacttagctgggaagaggaagcatcagatgggtgtcgrgggagactgaaataacaacacaagcagtgacacagacacctgggaggagacaatcacattatttaaccatcagtcagcatggaagctgggcacagggtcc

SEQ ID NO: 20410 - DNA, 201 bp, Homo sapiens
gccttggaagagaggacttcttggacacctaacccggagggagcagagcttctgagtgcccaggagagggaggctagggaagtgggggacagtcaagagtkgggggacacaggcagggactgtgcgactccacccaacacaaagactcaacgagtatgcacgtgactacacgtgagtgtggagggcttggccacagccctg

SEQ ID NO: 20411 - DNA, 201 bp, Homo sapiens
acagcgattttaatttgaaagcgattttatgtatgagaggggaaaggagccccaaagagaagggacgcagggcaaaaatcatgcagccccagcaccccacytctgcgggctggccacctcccctcaattctcaggccaggatcctgtgtccccagcctatgctatgtgcccagggctggaggagagctgtaaagggaaggc

SEQ ID NO: 20412 - DNA, 201 bp, Homo sapiens
attggggggtgggcatagacaggaaggggatggggtaattggaaggtgtggggtgaagggcgggagagggagatataaagatggtgtgggagttgggaaaygggggaggtgtggagttgggaaacagagagttgaagatgaaaggagaggttgagggtcaggagggaggtggggagaggtggaacagagggaaggggttcc

SEQ ID NO: 20413 - DNA, 201 bp, Homo sapiens
ctacacgctgcttccttttccctctgaccttccccccaatcgcgtcctacatctcagcttcagcttctttactcccatcaggcctcccccaggtcacttgstctgaccaaactccataagccctgggaatcccacaggtgatgatacatggcccagactctccctctctgttcatcctctgagccacatacctgagcttct

SEQ ID NO: 20414 - DNA, 201 bp, Homo sapiens
aaccctacacgctgcttccttttccctctgaccttccccccaatcgcgtcctacatctcagcttcagcttctttactcccatcaggcctcccccaggtcamttgctctgaccaaactccataagccctgggaatcccacaggtgatgatacatggcccagactctccctctctgttcatcctctgagccacatacctgagc

SEQ ID NO: 20415 - DNA, 201 bp, Homo sapiens
ctgcctgccactcctttgttgcatgaccttgggaaagccaagcctcaggctcatcttctctaaagtgggtgttttgaccaagatatgctctaaagtgtctytcagaatcctaggaatctgacttaagaagataagatggagacacagaagaaggaagggaagccctgaggtcttcagtaaagtctgtaagcttaagagtgc

SEQ ID NO: 20416 - DNA, 201 bp, Homo sapiens
acctgcctgccactcctttgttgcatgaccttgggaaagccaagcctcaggctcatcttctctaaagtgggtgttttgaccaagatatgctctaaagtgtytctcagaatcctaggaatctgacttaagaagataagatggagacacagaagaaggaagggaagccctgaggtcttcagtaaagtctgtaagcttaagagt

SEQ ID NO: 20417 - DNA, 201 bp, Homo sapiens
tgatcccaaacctgcctgccactcctttgttgcatgaccttgggaaagccaagcctcaggctcatcttctctaaagtgggtgttttgaccaagatatgctytaaagtgtctctcagaatcctaggaatctgacttaagaagataagatggagacacagaagaaggaagggaagccctgaggtcttcagtaaagtctgtaag

SEQ ID NO: 20418 - DNA, 201 bp, Homo sapiens
gtgcaaatcttgtgctcttctgactcaacaaataggcagtgaaaggagcactggcctaggtctttgaagatgtgggttctgatcccaaacctgcctgccamtcctttgttgcatgaccttgggaaagccaagcctcaggctcatcttctctaaagtgggtgttttgaccaagatatgctctaaagtgtctctcagaatcct

SEQ ID NO: 20419 - DNA, 201 bp, Homo sapiens
aactgactctaagtgtgtctgagtgcaaatcttgtgctcttctgactcaacaaataggcagtgaaaggagcactggcctaggtctttgaagatgtgggttytgatcccaaacctgcctgccactcctttgttgcatgaccttgggaaagccaagcctcaggctcatcttctctaaagtgggtgttttgaccaagatatgct

SEQ ID NO: 20420 - DNA, 201 bp, Homo sapiens
tctcctcgggggctcccccagccccctccccatccccatccttgtcctttccccgctgacgctcctcctgtaccgctgcagggggaagggggagagaaaaratggaaagtcagcagccagccatgaaggggttccacaaatatccttacggcctcatcaggatctcatggcccttgggagatatttataggaattggggaa

SEQ ID NO: 20421 - DNA, 201 bp, Homo sapiens
ggtcctggaggcaaggccagtgctttgtgctgggggaaggacagagggtgagaaatcaccccaaatcatgggagaacccgacaaattcagagactcaaggscaccgaagagagacaaccagtcctcacaggtatctggggtcccttccaacttgggatatcaagcagatcccttggagggtttatgttcttggttctgccc

SEQ ID NO: 20422 - DNA, 201 bp, Homo sapiens
gacacaatgacagacaaaggagtccaggaatgaccaaagagatagggaagacaaaaggtgacaacactggacagaaagtggctcccgggaacagaaatagsacatagaaagtaagaccattagacaccaacatggagacgaagtcactcaggaatcaaagaatcatggaaggaggcctggatactgaagggaacgggctgg

SEQ ID NO: 20423 - DNA, 201 bp, Homo sapiens
ggacacaatgacagacaaaggagtccaggaatgaccaaagagatagggaagacaaaaggtgacaacactggacagaaagtggctcccgggaacagaaatasgacatagaaagtaagaccattagacaccaacatggagacgaagtcactcaggaatcaaagaatcatggaaggaggcctggatactgaagggaacgggctg

SEQ ID NO: 20424 - DNA, 201 bp, Homo sapiens
ggcccttgtcacccccaccactgccaaaccggaactgagggcaaggagagaaggtccaggttctcttccaagaaagccatgggaccctcccagccagaggstttctccagcgtttctgccccttgccccaggttctgcccatccagcatttcccatggcttccagataatcacttagaggattccagaaactcaactcctg

SEQ ID NO: 20425 - DNA, 201 bp, Homo sapiens
agggcccttgtcacccccaccactgccaaaccggaactgagggcaaggagagaaggtccaggttctcttccaagaaagccatgggaccctcccagccagasgctttctccagcgtttctgccccttgccccaggttctgcccatccagcatttcccatggcttccagataatcacttagaggattccagaaactcaactcc

SEQ ID NO: 20426 - DNA, 201 bp, Homo sapiens
cacctgcccggccctgggagaacaagggaagtgtcagaacaagcagggccgcagtcccctaccctgcaggccctgtctccccacaacacccatccaccccwggggcactcacccttcgcccagccttgccaggagggcctgtgaggccctgaggtcctctggggccctggtgagaggagagatggggtggggttaggaggc

SEQ ID NO: 20427 - DNA, 201 bp, Homo sapiens
gggtgaggtggggcgggcaggcagagaaaaggccctttgagtccaggagccgggaaaccacggccttcccccccaacccccacctaagcctggcccctgckcgtgtggcagctccgcaaacaccaacacacaagggccgctttgagagacgaagggtgagtgagacagagacacagagactcacagagaccccaggccaag

SEQ ID NO: 20428 - DNA, 201 bp, Homo sapiens
ccacttcagccctacccgaaagccccacagccctcccctaaaactccctcttcacaaacctttcaagcctgccaaggagacctcagggttccctgcccccscagttcccagccccacctcagcaaacacaacctctccatctccctgagagcctctttcaggaaggtccccagaaacttccagtgtttttgtttgtttgtt

SEQ ID NO: 20429 - DNA, 201 bp, Homo sapiens
acaggtgtggacactcagcctgtggctgaggagtggtctgtgcagaacagatctgggaatctgggaagcgttgattggagggatgctcccgagttctgagsaggaggcctgggcatatgtggggaaggctcagatgagcacatagaaggggtttctaagaaaagaatggccaccaggtcactgctagacttaccgcagggc

SEQ ID NO: 20430 - DNA, 201 bp, Homo sapiens
acccccaccactgccaaaccggaactgagggcaaggagagaaggtccaggttctcttccaagaaagccatgggaccctcccagccagaggctttctccagsgtttctgccccttgccccaggttctgcccatccagcatttcccatggcttccagataatcacttagaggattccagaaactcaactcctgccctcctcca

SEQ ID NO: 20431 - DNA, 201 bp, Homo sapiens
actcaccctcgcctgctgcaggatcgcctgggcctgagcctcctgggccgccaccacagggcccttgtcacccccaccactgccaaaccggaactgagggsaaggagagaaggtccaggttctcttccaagaaagccatgggaccctcccagccagaggctttctccagcgtttctgccccttgccccaggttctgcccat

SEQ ID NO: 20432 - DNA, 201 bp, Homo sapiens
gcactctccaaattcacccttcctctcctgatcctcatccactgcccaggattctccccaacctccctgttaaccccaaaccaacccaggcctcccctgcsgcacactcactccagccaacccttccagtgccccccagagccttccctttccagggaagcagccccactcaccctcgcctgctgcaggatcgcctgggcc

SEQ ID NO: 20433 - DNA, 201 bp, Homo sapiens
agcaccctgctcactcaccaagggtccagggcgccctgtgtatcccatggggccagggggtccacggagcgccagctaggggagcagggggacagcagagstgagggacaggcagtgggaacccccagccccagcactctccaaattcacccttcctctcctgatcctcatccactgcccaggattctccccaacctccct

SEQ ID NO: 20434 - DNA, 201 bp, Homo sapiens
ctcgaggtccctgcattcacggtgaggggaggagacggcatgaatggataaaactgtgtccctttagtgctcatgtccccctcctggcttccccagagccscctcccccagcaccagcccttggacactcaccgactctccaggcagccctcgaggcccaatctccccgtcatctccctggaggaggaggacacggtaaag

SEQ ID NO: 20435 - DNA, 201 bp, Homo sapiens
agctggcccaggcctgcagtgtgtgggactgtggatctgtgggcttgtgggctttggttttgtttttcttgaagatttatttcctatgcccagagccctcrgggcaccacgccacatggccctccctgtgcacggggagcgaatgctgaggcagggcagtgtggggccagagcagggggagctcacagggaatgggaagca

SEQ ID NO: 20436 - DNA, 201 bp, Homo sapiens
atgtaatcaacaagcatccctgtgcctctgtaaaacctcagcaaaacagtacgtcacatgcctacctcataggatagataggacgcatcagcacagcaccwggcacagggcaagtgctggggagagtcagctctggagaccacagacctcactgctattagactctctcatctcagaactcctgctgcttggagtccgaac

SEQ ID NO: 20437 - DNA, 201 bp, Homo sapiens
ggcctctttcggtcatctgtaaaatgggggtcagctaaattccctctggggtcccccactgccctgcatctgtgctttctggaatcagggatcagggaagsgaagaggaggagggaagaggaggaggggcacgtatggggcatggcatcaccttgggtccctgacgtccaggatagccaggcagaccaggaacacccagct

SEQ ID NO: 20438 - DNA, 201 bp, Homo sapiens
aagctccccacacctggaacctcaatcctgtctcaccacccccaccaaccccaccacctgggacccaaagattcaagatccagcccaccagccctgtctamctagaactcagcttcctagggctcaaactccctggaaaacaaaagatcaccttgccctcacttgctcccctatacacatactcttcacaccatcagctcc

SEQ ID NO: 20439 - DNA, 201 bp, Homo sapiens
atacaagaaagctctcccaggagtctgtgcctcctggtttaggagatgagttggggaggggtggaggaatggggggcaggggctgaagctgccacgaggakccggaacaggtccagggccctgagccacacatctgtggatcccatcagagtgcttgcccagaacccaggcaagctccccacacctggaacctcaatcctg

SEQ ID NO: 20440 - DNA, 201 bp, Homo sapiens
tctgacccacctcgcttctctgagtccttcttccctacctgctttccagctgagagttcacctgacaactgaaccccttccagggcccccctgggaaggaygggctgccgggacacccaggccaaagaggagaagtggtgagtgatgctcctggctacccattctcagggggctccatcagaccctttaaccccagagctg

SEQ ID NO: 20441 - DNA, 201 bp, Homo sapiens
ggggaccctgcgggcctgggcgccctggcggaccaatgggtccccctgatcctgctgcacctcgttccccaggggagccctgagaaagcagatggtcagayccccaggaaggagacaccagcccgcccataccagagaacctcagaccacaattcccaaaagctcccaaaatcagatgcattctggctgtccctggacagc

SEQ ID NO: 20442 - DNA, 201 bp, Homo sapiens
catgggtcaggtgttctctatccacaaataccacacacagctgggtgccaggcccagagcccctgctcccactcccagccacaagggcagaggggagctgwgggaggaccagaggctgctgggccttcggtgggggtggaggggtcactcaccgctgctccaggctgccccacaggaccaatgggtccagggggtccagga

SEQ ID NO: 20443 - DNA, 201 bp, Homo sapiens
cccaaagcacagccctaggcagataggccccacagtcccctcccctcagactccgcaggccctccagtctgcatcggcaggctgctggcagagtctggggsaaaacatcaccccatcctgaccccacctctcagcccctgtcctatcccccaacacacctgtaggccaatgggtcctgggggcccattgaatcctcttgtt

SEQ ID NO: 20444 - DNA, 201 bp, Homo sapiens
atacaaaacatgggcccaggtgacgaccccacccaaagcacagccctaggcagataggccccacagtcccctcccctcagactccgcaggccctccagtcygcatcggcaggctgctggcagagtctggggcaaaacatcaccccatcctgaccccacctctcagcccctgtcctatcccccaacacacctgtaggccaat

SEQ ID NO: 20445 - DNA, 201 bp, Homo sapiens
aatcttgaagatcagggatgcagcctctgcttccgagacaccttcagccatcccctactcccctcagtgacaatgggacatacacagaaagtcaagcctayaaggggagttccctagtccccttcccttcaagaaaggggaagaagggctcactcagaccagggatcaggcctcatagaggatggcagggagcagagactc

SEQ ID NO: 20446 - DNA, 201 bp, Homo sapiens
cccaggtctgtcattcacagggcctgagaggactcagcccccactgccccaaactcacagggttccctttggggccatcatcgcctgtggggcctttaggscctggtggccctggctctcctggctgccccgactctcctttctctccacgttccccgcgtggaccctgcagaacaagcggaggacacagatggcccaggg

SEQ ID NO: 20447 - DNA, 201 bp, Homo sapiens
tcccaggtctgtcattcacagggcctgagaggactcagcccccactgccccaaactcacagggttccctttggggccatcatcgcctgtggggcctttagsccctggtggccctggctctcctggctgccccgactctcctttctctccacgttccccgcgtggaccctgcagaacaagcggaggacacagatggcccagg

SEQ ID NO: 20448 - DNA, 201 bp, Homo sapiens
ctggatgccccattcccagagcatcccccaaactcccgggctccccacactccaagatcctccctcacacacacccatattcccaggtctgtcattcacarggcctgagaggactcagcccccactgccccaaactcacagggttccctttggggccatcatcgcctgtggggcctttaggccctggtggccctggctctc

SEQ ID NO: 20449 - DNA, 201 bp, Homo sapiens
tccattgcaccgtaatttagggatgttgtctcatttccagagcccacctgggagctcttgggggtgatagagactttatattctcttctttgttctccttrtccagcaggtattcagaaaatgttgactggcttggagggtgaatggagggatgggtgaatggagggatggatgaatggatagatgagtggatgggtggct

SEQ ID NO: 20450 - DNA, 201 bp, Homo sapiens
gcaaagacatgagagagatggagcggagagattcagagagaggcagagggtatcatccgggagaaagagtataggaggccaatcctaggtaaaaccctaasatgggagaaggtcactgtcagtcctccatatgcatagcccttttcagttttcaagggatctcataggaccttcataacaaccaggaaagttggcagaaca

SEQ ID NO: 20451 - DNA, 201 bp, Homo sapiens
cctggacccctgggacaatggccagctcctggacatcaccctgcaaagacatgagagagatggagcggagagattcagagagaggcagagggtatcatccrggagaaagagtataggaggccaatcctaggtaaaaccctaagatgggagaaggtcactgtcagtcctccatatgcatagcccttttcagttttcaaggga

SEQ ID NO: 20452 - DNA, 201 bp, Homo sapiens
acagagggaaggggttccacatgtggggcagaagcagacatgattaagagattgaccctctgatctttagaccactgaccccagagcctatctgtattctwactctccagaccccatccaacccaggctcccttcccttcccttcccttcccttccccctactacctccccttttcctgcccctccaggtaggtgggggcc

SEQ ID NO: 20453 - DNA, 201 bp, Homo sapiens
cgggggaggtgtggagttgggaaacagagagttgaagatgaaaggagaggttgagggtcaggagggaggtggggagaggtggaacagagggaaggggttcsacatgtggggcagaagcagacatgattaagagattgaccctctgatctttagaccactgaccccagagcctatctgtattctaactctccagaccccatc

SEQ ID NO: 20454 - DNA, 201 bp, Homo sapiens
tgggattggggggtgggcatagacaggaaggggatggggtaattggaaggtgtggggtgaagggcgggagagggagatataaagatggtgtgggagttggsaaacgggggaggtgtggagttgggaaacagagagttgaagatgaaaggagaggttgagggtcaggagggaggtggggagaggtggaacagagggaagggg

SEQ ID NO: 20455 - DNA, 201 bp, Homo sapiens
ttacctgataatcaggggttgtccccgtagtcatcacatcataataggggggctcgtagtcatagtagagagactcagtgggctgggattggggggtgggyatagacaggaaggggatggggtaattggaaggtgtggggtgaagggcgggagagggagatataaagatggtgtgggagttgggaaacgggggaggtgtgg

SEQ ID NO: 20456 - DNA, 201 bp, Homo sapiens
ccttagcaccatcctggccctgcagaagtgaagcaaggtcagaggtgggcccccaacctggctggcatcacctccaaaactgtcaataccccatccccttscccaccctgccatacccccggcttcccaatacccaagcccagcggccacacagaggacccccccatagaagccccaccctttttgccccttcccttctct

SEQ ID NO: 20457 - DNA, 201 bp, Homo sapiens
ggtcggccttgctgaccctgaagatttgagggggccacaggggtcaggaggagcatccccacactgcacccctcccatggcccctcactcccaccccagcmcagcccttccctgcagtgactcaccactgagcctgggagccccctcagaccatcagggccaggtttccctgctgggcctgcaggacccaccgggcctgtc

SEQ ID NO: 20458 - DNA, 201 bp, Homo sapiens
cagcctggcctgtagctccaggtcggccttgctgaccctgaagatttgagggggccacaggggtcaggaggagcatccccacactgcacccctcccatggyccctcactcccaccccagcccagcccttccctgcagtgactcaccactgagcctgggagccccctcagaccatcagggccaggtttccctgctgggcctg

SEQ ID NO: 20459 - DNA, 201 bp, Homo sapiens
agattcatctgttcaggtgcaaacaggtgtgtgcacgtatgtatgtttatctgctcctgcagacactgggctgataaccaactggtacacactgacccagwtcagttgctaaagtattgggatacttctgacctggttagtaaatagctgcagttcccagcccctcagccctcacccttaacccaacaccttcaccaagac

SEQ ID NO: 20460 - DNA, 201 bp, Homo sapiens
cctccccatcatgctcttagtctcctggtcctcctccctcccagagccctagaatctagccctactgctggattctactgcagcatcctactgctgcagcycactttcatcacgtgacacctctgcccccaacagtaaccccaggccctctgactggaggaggtccgagtatggacagcctcatactgggacaacatgtgg

SEQ ID NO: 20461 - DNA, 201 bp, Homo sapiens
acagaggccatcgatggaaatgaggaagaaccctccggccagaggaggggctggtccatcaagacgtcatgggctgaggggagtgagtcacaggtgcccastgcccccagatggggtgagggtggggcatagagttacctcctcaaggggtggcaagaggctcgactccaggatttcttcctcttcacctggggtggggtc

SEQ ID NO: 20462 - DNA, 201 bp, Homo sapiens
gaacaaaaaattatttcaccaagaagaaatgatagagaaacactgaaaatggacacaaggtagtagtttattgaccaaaagctttatgaaatccagcttcrgttagacaggaagtgatcaagaaagacaggaagtggctacatattttttttttttaattcccaattgccctgagcttcagaagtatccacaagagtcaca

SEQ ID NO: 20463 - DNA, 201 bp, Homo sapiens
caactgggcctgggttcccctggatgccagggggaccaatcaatccctgaggaacaaaagagtaggggtcaggtgtgggcattcagacaggtgtggacacycagcctgtggctgaggagtggtctgtgcagaacagatctgggaatctgggaagcgttgattggagggatgctcccgagttctgaggaggaggcctgggca

SEQ ID NO: 20464 - DNA, 201 bp, Homo sapiens
ccaactgggcctgggttcccctggatgccagggggaccaatcaatccctgaggaacaaaagagtaggggtcaggtgtgggcattcagacaggtgtggacaytcagcctgtggctgaggagtggtctgtgcagaacagatctgggaatctgggaagcgttgattggagggatgctcccgagttctgaggaggaggcctgggc

SEQ ID NO: 20465 - DNA, 201 bp, Homo sapiens
aactgagcccagcgtgggctgaaggctacaggcttcagggaggggcccaagcctgttaccttcactccaggatctccaggcatccctcgggctccatcagsacctgcccggccctgggagaacaagggaagtgtcagaacaagcagggccgcagtcccctaccctgcaggccctgtctccccacaacacccatccacccct

SEQ ID NO: 20466 - DNA, 201 bp, Homo sapiens
cgcgtcctacatctcagcttcagcttctttactcccatcaggcctcccccaggtcacttgctctgaccaaactccataagccctgggaatcccacaggtgrtgatacatggcccagactctccctctctgttcatcctctgagccacatacctgagcttctgtccccgcagattgcacatagccgtttgccagccccaggg

SEQ ID NO: 20467 - DNA, 201 bp, Homo sapiens
cagtgcaagggtcactaaaggagctctgaggtcatgcactggggtggaaggccaaggggaactggattcggaagtggggtcccactcaccgggggtccgtytgagccaggcatgccggggagccctggcttcccttgaggaccctgcaggaagacaaagaggctcagggtcactagaggggtcatgtctggacacagacaa

SEQ ID NO: 20468 - DNA, 201 bp, Homo sapiens
ccacccatcccacctgccattgcccagcctccacccacacagcccagggactgcctcccaaggtctcaggggtccacctcacttactcgctttccaagtgkccctgggggtccattctccccggtgggaccaggggatccctagggagagaggaattggggtggctgagtgtttatcctccagccaagggacccctcagga

SEQ ID NO: 20469 - DNA, 201 bp, Homo sapiens
ccaaatcaggatggccatgcagatgtgagccacaggatgccccttttgggctgcacttgcttgccctttaccagaggcctggcaagggaagcagggcccaytgggtttgtgggatggatccgtggatgtgggtttttcctcggccagttgggagatttccaggttgagggtcttactgagggggatagctgggtaacttag

SEQ ID NO: 20470 - DNA, 201 bp, Homo sapiens
cagatcggttcctacatctccaccagccccttcaccaccaccaccaccttttttatatttcagtctgactgcagaaggaggtgaagtgtaaaaagagactytggacagtgacagggcccctccctcttccagagaggcccccatctgccaggtttgagaggaggaaggcctgtcagggccctactctcatgtccatcagct

SEQ ID NO: 20471 - DNA, 201 bp, Homo sapiens
tgaccagaggtacagatgcagtaaatgtcttggaagtgggcctcagcctccccatttacagagattagactgggctatgtagcaccgtcccacccacaccsagaagcaatcgcacacccgtgtcagaaactggagccatagggaccccaaacccctacctggtgtccctggggcattgtttgtaattttatgctagtcacc

SEQ ID NO: 20472 - DNA, 201 bp, Homo sapiens
tggttaaaaaaaacatgccaagattcaacctgagaaagctgattgaaaaaaaaaatttttttaaataaaatatgccaagaaacatgctaagcacattttamcattcactcaattatcataatgatgctggaagcatttattctcatttttaagatgaagaactcggggttcaaagagattagtttgcttaaattcatataa

SEQ ID NO: 20473 - DNA, 201 bp, Homo sapiens
aaacacaggatagtcaggtccaaggagatgcaaatgggggacgcggttagggagtcccagagccgaggtagagggggagcagtggtaagatgagcgagcaktcgactctggttggaagggtccagggaaatggggtcactcggggacgtgggccgcctccgggcgggcaacgcctgagaagcacgcagcgctcggcgccca

SEQ ID NO: 20474 - DNA, 201 bp, Homo sapiens
aggaatgcaaagagttggctctggcctcagacacctgatcctggcctgtccggagggccgtcctgttggcagccagccccagtgctccccagagccagctkcgtggcagcatcgagggcacagggagggggagggggaccctgtccaggaggccaatgagacaggtagtcaaggcttcctttctttctgggcttactgggc

SEQ ID NO: 20475 - DNA, 201 bp, Homo sapiens
actgggttccccactcccacacttctgcagacccacccctcctttgatattccctccatccctactccttcccattcctcctccttggtctcaccatcccractgctttctcctggcttcagtcccctctcctacctgcctccccagctctcacccctctcccactgtctcccaatctcttaattcaaagaaggaagggaa

SEQ ID NO: 20476 - DNA, 201 bp, Homo sapiens
tgagaaagatagaggtgagagggcaccacagatgacagagggctggggttctaatgggaattctgagaacataggtggaagcaggggctcgggagctggasggcagtgcggggcaggctggagggaaggcagtgaagagaggagatggcaggactgaggtgctgggaagctgggggcatggtgctcaccttctcaccctta

SEQ ID NO: 20477 - DNA, 201 bp, Homo sapiens
ggggtcaggctcccaagggaacacagcactggaactgtggagtctggagactcaggagaataaaccggtgcttggcgtctccagagtggaggctcagtagracacggaattggggccagtgtggggtctctactcaccctgtcacctttcacgcctatgtcacctttgaacccaggaaagccatcctcaccctgagaaaga

SEQ ID NO: 20478 - DNA, 201 bp, Homo sapiens
gctgagtgggggaactcagcttccttcctggggtgaggagggagctggctcacccaggctccctggggacctcaggggaaggggactttcgatccacactyaccctctctccagggggcccatgggggccatcaccaccagatgttccctgtggggggaaacagagtcaaggagtgggaagagctgctttccagctgtccc

SEQ ID NO: 20479 - DNA, 201 bp, Homo sapiens
ccctgatcctgctgcacctcgttccccaggggagccctgagaaagcagatggtcagacccccaggaaggagacaccagcccgcccataccagagaacctcrgaccacaattcccaaaagctcccaaaatcagatgcattctggctgtccctggacagcctctgcccagccccacagcccctggtggtatcagaatgccact

SEQ ID NO: 20480 - DNA, 201 bp, Homo sapiens
atggcctggaggtgaccctcaccctcaaacaccccacaggaaacttgtcatagcccatcaaccctaggctcacagacccctccccagtacccctccccaakacccccacactcactgggacacctttctctcctgctgctccagggggaccctgcgggcctgggcgccctggcggaccaatgggtccccctgatcctgctg

SEQ ID NO: 20481 - DNA, 201 bp, Homo sapiens
tgctgggccttcggtgggggtggaggggtcactcaccgctgctccaggctgccccacaggaccaatgggtccagggggtccaggagggccctgggtaagaraagagagtcagagacaccaaaacagggagagagatcaggtgggactgaggttaaaggccaggaggtcagaagtcaaggtcatggacacttacatgttcac

SEQ ID NO: 20482 - DNA, 201 bp, Homo sapiens
acacctcctgggggaccttgtgggccctggaagaggaacagaaataggtgtcattgcttaggatggaggtgccatttcaggggcaaagtcccagatgagcrgcccaaggttacagcagtgaggcagtggaggcctcccgggagtaagggcttctcttggcccctgagacgatactagagtttatggtctgggaaagggagg

SEQ ID NO: 20483 - DNA, 201 bp, Homo sapiens
agggctggcctcagagggggagagagagggctggcctcagagggagacagagacgggcctcaggagcatctacggcaccaggacagctgagccagagtcaygagcagggaatggctggaaggcaagggctgggaaagaagtgaggggctgagtgggagccaggagactgggggtacacgaaaggcaaagtgagcatcagag

SEQ ID NO: 20484 - DNA, 201 bp, Homo sapiens
gtgccagtctgtgtacacgtctgcattaacctgtgtgacgctggtgtttgtacccaagtgaacctcacccgatggcttccatcctttccaccttcctcacyggcttttgagctccctcaggcatccctgacaatccagcaggacggactcctccctgctccccctgggtgccctgcccaaggggtcttcccacctccttcc

SEQ ID NO: 20485 - DNA, 201 bp, Homo sapiens
gaggcaccccccaccctctaacctcaggcccaggctcacctctcctctgagcaccttggccccatcagggtgactcaggatgtacagactggcagtgtctrtgtgcccatgcgtgtgtgtttgcttctcccccaccgtgtgcctctgctgggcagccatgtgccagtctgtgtacacgtctgcattaacctgtgtgacgct

SEQ ID NO: 20486 - DNA, 201 bp, Homo sapiens
agagcatctgaccaaacgtgacctttgggaaagtcctcttgctgttcggggggcgacctctgcgggtttggctccagctgcagaaagagcgccaaagaaayctcaactccagcccggctaggctgggagtgggtgcgggagaaacagatggggggcacctatttagatctgatcttctcttaatgtgaccctgagagggag

SEQ ID NO: 20487 - DNA, 201 bp, Homo sapiens
gtacagccagtgtggcttttatctgttgtactttgggaaatcatccatgcctcaggaaccaaaagtccttcaacctagagtaaggcgtttttaatagaaasagaggccagataggccaggcgcggtggcttacgcctgtaatcccagcactttgggaggccgaggcgggtggatcacgaggtcaggagatcgaaaccatcc

SEQ ID NO: 20488 - DNA, 201 bp, Homo sapiens
ccacattctttggcctgaggctctgccggagtccaagcctgttataggtgaagtggccaagacctggaacatgacctttacatgagctgctgtacagccartgtggcttttatctgttgtactttgggaaatcatccatgcctcaggaaccaaaagtccttcaacctagagtaaggcgtttttaatagaaagagaggccag

SEQ ID NO: 20489 - DNA, 201 bp, Homo sapiens
ttagtaataccagtatgccttatttcatgaggagagcaggccgattacctgacccaacaatatagcccaggcccgggggagatgtgaacacaatgaggaakatatctctatgacccacattctttggcctgaggctctgccggagtccaagcctgttataggtgaagtggccaagacctggaacatgacctttacatgagc

SEQ ID NO: 20490 - DNA, 201 bp, Homo sapiens
attagtaataccagtatgccttatttcatgaggagagcaggccgattacctgacccaacaatatagcccaggcccgggggagatgtgaacacaatgaggamgatatctctatgacccacattctttggcctgaggctctgccggagtccaagcctgttataggtgaagtggccaagacctggaacatgacctttacatgag

SEQ ID NO: 20491 - DNA, 201 bp, Homo sapiens
tttggggtttgtttgtttctatagatttgcagttctaaaagtaaggaaaacctgcaggtattaatacaaataaccacaactgggaagggatggaattatargaaatctctcccagcattagtaataccagtatgccttatttcatgaggagagcaggccgattacctgacccaacaatatagcccaggcccgggggagatg

SEQ ID NO: 20492 - DNA, 201 bp, Homo sapiens
tttgcgatttgtaacaagaaaataataatagtaagtatagagttttaacagcactaaaatcaaaagtggaaaagggacagcagcatgccccagacacccgygtgtcagcaataaccaagacatggagatggaaccaagacagcttgtcaggtccctcccctcactttccattgcaaaggctgtcagtaaagggggaattat

SEQ ID NO: 20493 - DNA, 201 bp, Homo sapiens
acagagataacccaagctaagccaatcagattgtctctccatgactttgaaccatggggcccagagacacagaggtcaagagcagctctgctgagcggtgrgtatccacactccagggacaaagtccatgagcccctgaggttcccagaactgctctcagtcttccctattgagtcaactctgtcttcaaatcctgagaaa

SEQ ID NO: 20494 - DNA, 201 bp, Homo sapiens
aatgtgactttgggttgcccatccaggagattgggtggcagggagagcaaatgtgatcatgaaggggctggttgtatcacgctggtcaaatgcatacaaasgagtctgtttagacagaagcgaagaagggaaagcaagcggacacctcctgggggcctcaggatcccacattatctggaaacagtgcccccaacacccctc

SEQ ID NO: 20495 - DNA, 201 bp, Homo sapiens
gcagaagtcacaatgcagccctggatataacggccatgaaagtttatgtgctgaatcacaaagtggcaaaatatgaactggcagagatgtcggcctctgargttagagaggtcatggccacagctgctgaatgtgactttgggttgcccatccaggagattgggtggcagggagagcaaatgtgatcatgaaggggctggt

SEQ ID NO: 20496 - DNA, 201 bp, Homo sapiens
tggaaggggttcagttgtcaggtgaactctcagctggaaagcaggtagggaagaaggactcagagaagcgaggtgggtcagagctcggggtcaacttaccrggggtcctttcggtccaggaaacccgttgggaccctgaggtccagggaggccctagagacagaggtggggggagtcaggagaatgggggcaggggctgag

SEQ ID NO: 20497 - DNA, 201 bp, Homo sapiens
ggcagcccatccttcccaggggggccctggaaggggttcagttgtcaggtgaactctcagctggaaagcaggtagggaagaaggactcagagaagcgaggkgggtcagagctcggggtcaacttaccgggggtcctttcggtccaggaaacccgttgggaccctgaggtccagggaggccctagagacagaggtgggggga

SEQ ID NO: 20498 - DNA, 201 bp, Homo sapiens
ccacgtaagagaactggaaggagagagagggctggcctcagagggggagagagagggctggcctcagagggagacagagacgggcctcaggagcatctacrgcaccaggacagctgagccagagtcatgagcagggaatggctggaaggcaagggctgggaaagaagtgaggggctgagtgggagccaggagactgggggt

SEQ ID NO: 20499 - DNA, 201 bp, Homo sapiens
tgggcgccctggcggaccaatgggtccccctgatcctgctgcacctcgttccccaggggagccctgagaaagcagatggtcagacccccaggaaggagacmccagcccgcccataccagagaacctcagaccacaattcccaaaagctcccaaaatcagatgcattctggctgtccctggacagcctctgcccagccccac

SEQ ID NO: 20500 - DNA, 201 bp, Homo sapiens
tcacgaaaagagaagggtgagagctggagagggaagacaggctccaaaagatggaagtggggagtgacatggagggggtcagggacagggtcggggtgggkactcaggatgcttggtgcttgtgacaggcaggggtctgggagtcacactcacagcagtgcctgggaggcctctctctcctgggaatcccctcagaccagc

SEQ ID NO: 20501 - DNA, 201 bp, Homo sapiens
cagaaggagatggagatagaacacatttagagcatggagctgagtcccagcagcgatagccaagaaggcaagagcaggaagcaggcaggggtcaaaatggmggccaacaggatgctggcagggacctcgggggataagaatgggggtgggatctcctatccatcactcaccaagctccctttggggccctggggaccatcc

SEQ ID NO: 20502 - DNA, 201 bp, Homo sapiens
ccacccctttcccgggtccttcctaccacttccggaaccccagactcactgcagggccaggggggccagacggaccttcattccccttcaaaccaggtccmccctatgaaccagacatttggggaagatgagacttcacgaaaagagaagggtgagagctggagagggaagacaggctccaaaagatggaagtggggagtg

SEQ ID NO: 20503 - DNA, 201 bp, Homo sapiens
ccttggagctgtcactcaccttgacacctggctcgccctggatccctggagatcctgactctcctggttccccctgcaaagagattagagtcaaaaacctyctctccttccccagccaaaaaattctgatattccccacatctcattctcttttgtctccccacccaaaattggcagaaatccaactcccatcccccactt

SEQ ID NO: 20504 - DNA, 201 bp, Homo sapiens
tggatccctggagatcctgactctcctggttccccctgcaaagagattagagtcaaaaacctcctctccttccccagccaaaaaattctgatattccccayatctcattctcttttgtctccccacccaaaattggcagaaatccaactcccatcccccacttccatgactggtccactcacccccttcccagttaccttc

SEQ ID NO: 20505 - DNA, 201 bp, Homo sapiens
ggaggccggggggacctccaggaccaatggggccggatgctcctgggataccctaggaagggtagtggctggttcaactgggtcctcctcccacaccctcmtgagcacctgctcgcttacccacagctgagtcccaactccaactccacccctctccaccccactctcaacccccacaacttccgggaccatgccctctac

SEQ ID NO: 20506 - DNA, 201 bp, Homo sapiens
tgcagaagtgaagcaaggtcagaggtgggcccccaacctggctggcatcacctccaaaactgtcaataccccatccccttgcccaccctgccatacccccrgcttcccaatacccaagcccagcggccacacagaggacccccccatagaagccccaccctttttgccccttcccttctctgagtaagactcacccgaggg

SEQ ID NO: 20507 - DNA, 201 bp, Homo sapiens
gcactcacaggctgtcctggctcaccatcctcgcctcggtcacccttagcaccatcctggccctgcagaagtgaagcaaggtcagaggtgggcccccaacytggctggcatcacctccaaaactgtcaataccccatccccttgcccaccctgccatacccccggcttcccaatacccaagcccagcggccacacagagga

SEQ ID NO: 20508 - DNA, 201 bp, Homo sapiens
aaaagagaggcatttataaaggggcctcagagtgtcactgtgggggcctccaggggtggaagaaatggaagtaacaacattgctgtctgggtagggttacrgggcacaggaattgagaatgtggcagagccatatgaataatgagacaagggaatcccaaggactttgaggctctagagtctgagtggagactccctcagg

SEQ ID NO: 20509 - DNA, 201 bp, Homo sapiens
ggggtcaggagaggccacaaaggcagtggccagggagacccgagctctgccaagaactaagtggccttggacaaacccctgctgctctctgggcctctttmggtcatctgtaaaatgggggtcagctaaattccctctggggtcccccactgccctgcatctgtgctttctggaatcagggatcagggaagcgaagaggag

SEQ ID NO: 20510 - DNA, 201 bp, Homo sapiens
ccccagatggggtgagggtggggcatagagttacctcctcaaggggtggcaagaggctcgactccaggatttcttcctcttcacctggggtggggtcctgwccccaaggagagaaggagaagagtagcacggggtgggaaggaaggagaaaggttagcagaagggaggcaaagcagcacctgtcccccgagggcagggtct

SEQ ID NO: 20511 - DNA, 201 bp, Homo sapiens
cagacccctccccagtacccctccccaatacccccacactcactgggacacctttctctcctgctgctccagggggaccctgcgggcctgggcgccctggsggaccaatgggtccccctgatcctgctgcacctcgttccccaggggagccctgagaaagcagatggtcagacccccaggaaggagacaccagcccgccca

SEQ ID NO: 20512 - DNA, 201 bp, Homo sapiens
ataccctgtggagtcaaaggttaaaaatcagaggcgacaggaccagcacactcaaccccacttgcttctcctatttccactgcctcagccctgtgaccagyataacttacaggttccaacactgcaggctctcctttctctcccttcagccctcggggtccatgggcagcctgaaggagacacacatgtagcccccagtgg

SEQ ID NO: 20513 - DNA, 201 bp, Homo sapiens
atgggcagcctgaaggagacacacatgtagcccccagtggggcccgtgagcagccaggacactaggcctttctccatctcaactccaaccttgattcttaratcctctcgagaccacttcagccctacccgaaagccccacagccctcccctaaaactccctcttcacaaacctttcaagcctgccaaggagacctcaggg

SEQ ID NO: 20514 - DNA, 201 bp, Homo sapiens
gcaaaagatggggtgaaagataaggggacatcaagatcttagcatgattttgaaatatcctcttcaacagaataagtgtagattgctctagctctttcctragtctcccacccccatggggaaaattgagggtgagaaaccagatcagcaccctccccaaccagagtctgccctcctttctggttgctgggaagcacaacc

SEQ ID NO: 20515 - DNA, 201 bp, Homo sapiens
ggggtgcagtggaggaaagtggtcacctgaggtcctaagtctccagactctcctttcaggccagggctcccaggttggccctgggagagagaagagaggawggccgtaaggaaggacacagccaacagtggcctcggagtgttccccaaaagaagcccctttccagaactatccacaccccacacacaattaaagcatcct

SEQ ID NO: 20516 - DNA, 201 bp, Homo sapiens
cccaacacaggcagacaccgaacctctgcacttagcccatccattactttcactgagctcctgccaagcctccagcctcccttccctacctatcctcactyccatagaagatctatccccaattacaacacacacccactaatgtactcaccctatggcccttctctccagggagccctgggagtccatcaaaacctcggt

SEQ ID NO: 20517 - DNA, 201 bp, Homo sapiens
aagacagggagcagactatgagcctcagacgccggggtcccagggaggtcagaggctgcgggcagcgacagctgtcagcggcccagctccatgcagcaagkcgccgtcggggctcccggcactgctccctcctcggtggctgccgcttctgtgtgtccccggccaccctggcgcccagagcccccacctcgcccccgcccc

SEQ ID NO: 20518 - DNA, 201 bp, Homo sapiens
agacgccggggtcccagggaggtcagaggctgcgggcagcgacagctgtcagcggcccagctccatgcagcaaggcgccgtcggggctcccggcactgctycctcctcggtggctgccgcttctgtgtgtccccggccaccctggcgcccagagcccccacctcgcccccgcccccggcccggcccccgcctccagccgcc

SEQ ID NO: 20519 - DNA, 201 bp, Homo sapiens
ctcttctatccagcctcccggattcaaagcatgagcaacaagggcctgaaacccttaatttcctgtatccttccagggtctcacccattgtggaagcccargggaagtcatgaaaattggggaacggagtaggggcaccgctcacctgggtcccaggggtgccctgttgtccaggaggtcctggctctccctggggtccct

SEQ ID NO: 20520 - DNA, 201 bp, Homo sapiens
agtggggtcccactcaccgggggtccgtctgagccaggcatgccggggagccctggcttcccttgaggaccctgcaggaagacaaagaggctcagggtcaytagaggggtcatgtctggacacagacaaaatcccagcagacatttagggttctccctacatccccactctaaaccccctgtcctccaaatcacttagtca

SEQ ID NO: 20521 - DNA, 201 bp, Homo sapiens
gggttacggggcacaggaattgagaatgtggcagagccatatgaataatgagacaagggaatcccaaggactttgaggctctagagtctgagtggagactmcctcaggggataaagacatggaagatctcacctggtttcctttggttccagggggaccttccttccctgggtgaccctgggagtaagggatagaaaatgt

SEQ ID NO: 20522 - DNA, 201 bp, Homo sapiens
gggggcatggtgctcaccttctcacccttatgacccttcagaccccgaattccgtccacaccctagaattagagaggggatagaagtagactgatcagggratggaggtgggttggaaggaccaagctcctaagaccccatatagctcccctgaccacagccctttgtctcccagcctggtggtcagttaccttgacccct

SEQ ID NO: 20523 - DNA, 201 bp, Homo sapiens
gctggagggaaggcagtgaagagaggagatggcaggactgaggtgctgggaagctgggggcatggtgctcaccttctcacccttatgacccttcagacccygaattccgtccacaccctagaattagagaggggatagaagtagactgatcaggggatggaggtgggttggaaggaccaagctcctaagaccccatatagc

SEQ ID NO: 20524 - DNA, 201 bp, Homo sapiens
ggcaaagggagccgccacaacccctttcctcctggtgtctgatcctaggccccatcccattacctccccccaggcctaccccaccatgtcacccatacctkggaaaagctggcgagtgggtgcactgagctgggcaggtcgtgccactcggtaggccacatcagctggacagatgcctttcgctctccggacaccatcagg

SEQ ID NO: 20525 - DNA, 201 bp, Homo sapiens
gagagaagaggggcagacagactaatgctagggtcaggggtccattctctcctagggacaaacctacctgaggtcccaccactcctggaggaccagggggrccggtcttcccttggaaaccctaggcgaggaagagaggagaatgcagtgaaagcaggtgtgggcgctgtggggcagattcccaggaggaaggatcccagg

SEQ ID NO: 20526 - DNA, 201 bp, Homo sapiens
ctctgcccagccccacagcccctggtggtatcagaatgccactcccacccttcctcacccacccctttcccgggtccttcctaccacttccggaaccccaractcactgcagggccaggggggccagacggaccttcattccccttcaaaccaggtccaccctatgaaccagacatttggggaagatgagacttcacgaaa

SEQ ID NO: 20527 - DNA, 201 bp, Homo sapiens
caaagtcccagatgagcagcccaaggttacagcagtgaggcagtggaggcctcccgggagtaagggcttctcttggcccctgagacgatactagagtttayggtctgggaaagggaggcagaagaccagacacattggtctcaagggacaggggctgagatgactcacatcagcgccattgggtccagctggacctcgagg

SEQ ID NO: 20528 - DNA, 201 bp, Homo sapiens
tggaggtgccatttcaggggcaaagtcccagatgagcagcccaaggttacagcagtgaggcagtggaggcctcccgggagtaagggcttctcttggccccygagacgatactagagtttatggtctgggaaagggaggcagaagaccagacacattggtctcaagggacaggggctgagatgactcacatcagcgccattg

SEQ ID NO: 20529 - DNA, 201 bp, Homo sapiens
ccccacttccatgactggtccactcacccccttcccagttaccttctctccagggggacccaggttcccaacacctcctgggggaccttgtgggccctggragaggaacagaaataggtgtcattgcttaggatggaggtgccatttcaggggcaaagtcccagatgagcagcccaaggttacagcagtgaggcagtggag

SEQ ID NO: 20530 - DNA, 201 bp, Homo sapiens
ggtccgtgagtggccctcactgagcagggactccctgggactggctgccggaggcctgaagcagagcagtgggcacttgggtcccacaggtttcaggggcragggtgatgggagagacacctggccacgtgtctgtctgtcactcaccttctctcccttggctccagcatcgccccggagaccaggcagccctgggggtcc

SEQ ID NO: 20531 - DNA, 201 bp, Homo sapiens
agaatgcaaagaggagtcatgtggatgggggagaagggccaagaggacatggagagggagccgggcacagggtccgtgagtggccctcactgagcagggaytccctgggactggctgccggaggcctgaagcagagcagtgggcacttgggtcccacaggtttcaggggcgagggtgatgggagagacacctggccacgtg

SEQ ID NO: 20532 - DNA, 201 bp, Homo sapiens
tccctcacctggctctggggttcctgattttgtggcctgtgaagtcttgatggttgctgctgtggagatctctgggctctgtgaggctgttggttttgggrtctttccctctggcccccctcgcattccagctccttctgttcacatgattcataggctgcctggacccctgggacaatggccagctcctggacatcaccc

SEQ ID NO: 20533 - DNA, 201 bp, Homo sapiens
tgaatgaggactaggaggagggggtgatgggaatagggagatgagggtggggaggacaactaaggaggagagatgcctgggtgtcttccctctctggggtrtgctgcacttgggggttctcccagctccctcacctggctctggggttcctgattttgtggcctgtgaagtcttgatggttgctgctgtggagatctctgg

SEQ ID NO: 20534 - DNA, 201 bp, Homo sapiens
ctctcccttgggtccgcctgggccctgacaaggaataaatcaggtcatggaggggtcaagaggtcaagcatggatcaaggtcacagaaagatcaaatcagmctcctggctggaataaggggctccttggggggagtctatttgtcctggagagacatcatcaagtccagagggggtggagcaaaggtcagagctgaagggg

SEQ ID NO: 20535 - DNA, 201 bp, Homo sapiens
gagatgtttgtgcaccctgaggctagcactgaccatcgggaagctctgggtggcacagcttcaggtcctggcaggtgcgagcagggctgtcctgggtcccygttggccgcctcatctgctcgatctcctcccgcagggagtcgagtgagccaaagatctcctccagccccccaggactgccgggggctcccccggtcggta

SEQ ID NO: 20536 - DNA, 201 bp, Homo sapiens
cggtggggctcccaggtctgagaaggaggcatccagcactggcagctgctccagcacaggcgttcgcacctccagcaccgtccggccttgctgtgtcttcmgggggagacaaggaagaaagtgtgagcaggatggaggcaccccccaccctctaacctcaggcccaggctcacctctcctctgagcaccttggccccatca

SEQ ID NO: 20537 - DNA, 201 bp, Homo sapiens
ctccctagatagtgaggagccctcttgggaggtggcacagagctgatgttgtgggattccaggtgggcctggttccgaatggacaggatcagacagagacrgtcctatcccatgaagcagacaggccccagcagcacccctccccgcctcggtggggctcccaggtctgagaaggaggcatccagcactggcagctgctcc

SEQ ID NO: 20538 - DNA, 201 bp, Homo sapiens
ctgggggtgctgggagaaagggaagaaatgaaggggtcccttgagtttacctgataatcaggggttgtccccgtagtcatcacatcataataggggggctygtagtcatagtagagagactcagtgggctgggattggggggtgggcatagacaggaaggggatggggtaattggaaggtgtggggtgaagggcgggagag

SEQ ID NO: 20539 - DNA, 201 bp, Homo sapiens
agtaaatccccataatctaaacacactgtgcctctccccacggcatgggggaggggaggaaggtgtcctaggagatgattgctgggggtgctgggagaaarggaagaaatgaaggggtcccttgagtttacctgataatcaggggttgtccccgtagtcatcacatcataataggggggctcgtagtcatagtagagagac

SEQ ID NO: 20540 - DNA, 201 bp, Homo sapiens
ttacctcctcaaggggtggcaagaggctcgactccaggatttcttcctcttcacctggggtggggtcctgaccccaaggagagaaggagaagagtagcacrgggtgggaaggaaggagaaaggttagcagaagggaggcaaagcagcacctgtcccccgagggcagggtctgtctgtgctgggggatgggggaaatctcag

SEQ ID NO: 20541 - DNA, 201 bp, Homo sapiens
gatggaaatgaggaagaaccctccggccagaggaggggctggtccatcaagacgtcatgggctgaggggagtgagtcacaggtgcccactgcccccagatrgggtgagggtggggcatagagttacctcctcaaggggtggcaagaggctcgactccaggatttcttcctcttcacctggggtggggtcctgaccccaagg

SEQ ID NO: 20542 - DNA, 201 bp, Homo sapiens
cagaaagtggctcccgggaacagaaataggacatagaaagtaagaccattagacaccaacatggagacgaagtcactcaggaatcaaagaatcatggaagraggcctggatactgaagggaacgggctggacttagagagtcaagcaggcccatagttctagagtgacccaaagacagaggccatcgatggaaatgaggaa

SEQ ID NO: 20543 - DNA, 201 bp, Homo sapiens
atacatcatatgtgaacagaaaatgacaagtcacagatgggaaatagctcacagccaacagccaaggatcgaaaccaacaagaagcaattcttgtagctcmcactggtagtcaagaatgaaagagaagctcctttcacttacggctcctgagtgggctgtctccgcagagagggcagggccaagctctgtctcctcacgat

SEQ ID NO: 20544 - DNA, 201 bp, Homo sapiens
tctccgcagagagggcagggccaagctctgtctcctcacgataatcatccccatagccataggtgtaatcgtagggcccttcaggggggtctgtgccaccstccccatattcctctgcctggaacctgtcggctgtgggggggacctggagatctgtctgctccttcccagggatggggagggagaggggtagatggggat

SEQ ID NO: 20545 - DNA, 201 bp, Homo sapiens
caaactccataagccctgggaatcccacaggtgatgatacatggcccagactctccctctctgttcatcctctgagccacatacctgagcttctgtccccrcagattgcacatagccgtttgccagccccagggccacctggagggggtggacagtgcaggccccggacccctaagactggtggcttcacatcttcagggg

SEQ ID NO: 20546 - DNA, 201 bp, Homo sapiens
ccttgcaaccctcacagctgtaaaccccgtagtgtttgcctacagggaaaggggaggagcaataagaaggttgcatggagacaccttcaccatttagtctstttccaatctccccctagcaaaacttaaagtcctccctgtttgccaaatacagagatagggaaccaggagctgagtgatgatccagtcccagtctcctca

SEQ ID NO: 20547 - DNA, 201 bp, Homo sapiens
gaaaagtgtgggatcctcttcgcccactcaacaagcgtgaatagctgtttgtcagctgcctgacagatgttagtcacagggtcatttggctgcaggggacrggggtaagagttatggaagattttgagatatgctgggagcccccttgtaagaggcttttgacaccccctccttacatatagtcttcctgtgagccccatc

SEQ ID NO: 20548 - DNA, 201 bp, Homo sapiens
cctatagcgccaggatctccctgaaacacacacaaggaatgtgtcctgaatggcagaggagtggggtgtgggcagggggcagagggtccaaggtgggaggyaggaggcagggaggaagggccaaactctaggagcccctagcgcaggaacaagtacagggaacgcctgtccccataagggcccaacatgggagaggtggag

SEQ ID NO: 20549 - DNA, 201 bp, Homo sapiens
ctatagcgccaggatctccctgaaacacacacaaggaatgtgtcctgaatggcagaggagtggggtgtgggcagggggcagagggtccaaggtgggaggcrggaggcagggaggaagggccaaactctaggagcccctagcgcaggaacaagtacagggaacgcctgtccccataagggcccaacatgggagaggtggaga

SEQ ID NO: 20550 - DNA, 201 bp, Homo sapiens
ggaggaggcctgggcatatgtggggaaggctcagatgagcacatagaaggggtttctaagaaaagaatggccaccaggtcactgctagacttaccgcaggsccttctgggccagggggcccctccacgagcataccctgtggagtcaaaggttaaaaatcagaggcgacaggaccagcacactcaaccccacttgcttctc

SEQ ID NO: 20551 - DNA, 201 bp, Homo sapiens
ttcaggaaggtccccagaaacttccagtgtttttgtttgtttgtttgtttttctttttttttgagacgaagtcttgctctgtcacccaggctgaagtatartggcgcgatctcggctcactacaacctctgccttccaggttcaagtgattctcctgcctcagcctcccaagtagctgggattacactgggattacagatg

SEQ ID NO: 20552 - DNA, 201 bp, Homo sapiens
ggattacactgggattacagatgtgcaccaccatgcccggctaatttttgtatttttattagagatggggtttcaccgtgttggccaggctggtctcaaartcctgacctcaggtgatccgcctgccttggcctcctaaagtgctggaattacaggcgtgagccaccacacctggcccctttcagggattttaaaccaccc

SEQ ID NO: 20553 - DNA, 201 bp, Homo sapiens
aaagtgtgggccaggcagaccagaggagcaaacaaacttacttgccatctgctaggctgaggcctcggaagactggctgagagggaggttgaggccgcccwgtctggtcttcatacaggaagcggacaggtcggcccagctccaggcccagctgtcggacaccctgggcactgtagagagtcaggaggggagcttggagac

SEQ ID NO: 20554 - DNA, 201 bp, Homo sapiens
attaaacagaatgattgccctcaggcagccaagctctgtcttgtccatcctcatgtcacgcattttggacactagctctgtcagcaccctggagagggacstgcaggtcactcaaaggtcacagctcagccagccttggacacggaccagcctatagccccaccccctctatctacatgccagcctagccgagggccactg

SEQ ID NO: 20555 - DNA, 201 bp, Homo sapiens
gaaagagacggtcactgcaggggaaggacaggactcagaggagcggggaggcaaggtcccaagtccacaggagcctcgggttactacaggaggggcagtcytgtgggaatactaggacattcagagccctggaagtatggggaggaggtactggtggtgacaggacaaatgggggaccctgaggactatgcttgttaggct

SEQ ID NO: 20556 - DNA, 201 bp, Homo sapiens
cactcaccctcgcctgctgcaggatcgcctgggcctgagcctcctgggccgccaccacagggcccttgtcacccccaccactgccaaaccggaactgaggkcaaggagagaaggtccaggttctcttccaagaaagccatgggaccctcccagccagaggctttctccagcgtttctgccccttgccccaggttctgccca

SEQ ID NO: 20557 - DNA, 201 bp, Homo sapiens
gggtcacctcagggtcagaagtcagggagtcacttacagggggtccaggaataccaggtgggcctttggggccaaggagacctcgaggtccctgcattcayggtgaggggaggagacggcatgaatggataaaactgtgtccctttagtgctcatgtccccctcctggcttccccagagccccctcccccagcaccagccc

SEQ ID NO: 20558 - DNA, 201 bp, Homo sapiens
cagtaaatgtcttggaagtgggcctcagcctccccatttacagagattagactgggctatgtagcaccgtcccacccacacccagaagcaatcgcacaccsgtgtcagaaactggagccatagggaccccaaacccctacctggtgtccctggggcattgtttgtaattttatgctagtcacccaggctttgtaaactctg

SEQ ID NO: 20559 - DNA, 201 bp, Homo sapiens
gagccttgtagagaccattcaccttagctccagacttcccagtggcacctcggggtccccgctgaccccgtggaccctacagagggaagaggagttgtcasagaaacccaaatgcccccctctggaccttgagccacctgtttctctcccctgcactcaccgtggggccccgttctccccgaggccctgacttccccgaca

SEQ ID NO: 20560 - DNA, 201 bp, Homo sapiens
gtgaagaaactgatgctgaggttaagtgtgcaactcagaagcaaagcatccctgacaagctaagggaaggagaactctcagttggaaatacagagaggccygctgccagctagaatcagtgccacctttggccctaagtctgctcaacccacccaaaactagaccacctgccactcaaactcttttgtctgagtccctctc

SEQ ID NO: 20561 - DNA, 201 bp, Homo sapiens
tgccccagacacccgtgtgtcagcaataaccaagacatggagatggaaccaagacagcttgtcaggtccctcccctcactttccattgcaaaggctgtcastaaagggggaattattcctttacagagcaagtattatcccactttgcaggtgaagaaactgatgctgaggttaagtgtgcaactcagaagcaaagcatcc

SEQ ID NO: 20562 - DNA, 201 bp, Homo sapiens
aacagccagcccccacccagcaacacaccccacacaccccagcctctagcccctcattgcttgccccacagctgcctgacttttgttgtctctccttcccrtgagtggattttccccaattctagtgctgggatcccacctcccctgcgcctacagaggtatcaggtccttcagggtcactgtgatctagctgcttcccac

SEQ ID NO: 20563 - DNA, 201 bp, Homo sapiens
agccaccgaagggaaaccccaccctcagtctccacctggggagggaggcgggaaccctccctctatcgctcgctctctcctgccccttgtaggtctcaackgcctgtaccctaagattctcttttcgggaaccccaatatcttccctagccccttccttttctaggacccaaacgtccagtcacacacactccctcccatt

SEQ ID NO: 20564 - DNA, 201 bp, Homo sapiens
ccagctgtccccgaggtcaggatgttgagggagagctggggctgagtgggcagggggcagttggagccttgtagagaccattcaccttagctccagacttmccagtggcacctcggggtccccgctgaccccgtggaccctacagagggaagaggagttgtcagagaaacccaaatgcccccctctggaccttgagccacc

SEQ ID NO: 20565 - DNA, 201 bp, Homo sapiens
agggacccctggtgagaacggagaaggggggaaattgagaagttatgaaaggtagggttcaggaaggggcaaagggggtcaggagaggccacaaaggcagyggccagggagacccgagctctgccaagaactaagtggccttggacaaacccctgctgctctctgggcctctttcggtcatctgtaaaatgggggtcagct

SEQ ID NO: 20566 - DNA, 201 bp, Homo sapiens
cacggaattggggccagtgtggggtctctactcaccctgtcacctttcacgcctatgtcacctttgaacccaggaaagccatcctcaccctgagaaagatrgaggtgagagggcaccacagatgacagagggctggggttctaatgggaattctgagaacataggtggaagcaggggctcgggagctggacggcagtgcgg

SEQ ID NO: 20567 - DNA, 201 bp, Homo sapiens
agttggctctggcctcagacacctgatcctggcctgtccggagggccgtcctgttggcagccagccccagtgctccccagagccagctgcgtggcagcatygagggcacagggagggggagggggaccctgtccaggaggccaatgagacaggtagtcaaggcttcctttctttctgggcttactgggctctgctctgaat

SEQ ID NO: 20568 - DNA, 201 bp, Homo sapiens
ggagaggtggaacagagggaaggggttccacatgtggggcagaagcagacatgattaagagattgaccctctgatctttagaccactgaccccagagcctrtctgtattctaactctccagaccccatccaacccaggctcccttcccttcccttcccttcccttccccctactacctccccttttcctgcccctccaggt

SEQ ID NO: 20569 - DNA, 201 bp, Homo sapiens
aagggacagcagcatgccccagacacccgtgtgtcagcaataaccaagacatggagatggaaccaagacagcttgtcaggtccctcccctcactttccatkgcaaaggctgtcagtaaagggggaattattcctttacagagcaagtattatcccactttgcaggtgaagaaactgatgctgaggttaagtgtgcaactca

SEQ ID NO: 20570 - DNA, 201 bp, Homo sapiens
ctctgtctcaaaaaacaaaaaaaaacatgatctccctgtgcgccccatcccaaaccctcctctccttcgccaccatgccagcgcacaattccatcatatcmcttgccttttcaaacaccatctatgactcttagtttttgggttcaagttcaactccttccataagcagtcaatacttttcagaatttggcccctccaaca

SEQ ID NO: 20571 - DNA, 201 bp, Homo sapiens
acctgctcctgccaactgagggaaagccagacagggtgatatgctggctctcgctgaagctgagagctgtgttcattctaccatcctggccgtgtggggaragccctaaaggagaagcccatgtagatatccttggtctttattcaaggactagcaggacaggtcttccctactgagatggcagtctgctgtcagtgccag

SEQ ID NO: 20572 - DNA, 201 bp, Homo sapiens
ggcaaaccctgtgcaagtatacaaaacatgggcccaggtgacgaccccacccaaagcacagccctaggcagataggccccacagtcccctcccctcagacyccgcaggccctccagtctgcatcggcaggctgctggcagagtctggggcaaaacatcaccccatcctgaccccacctctcagcccctgtcctatccccca

SEQ ID NO: 20573 - DNA, 201 bp, Homo sapiens
agttgcctgtgtatcaacacaatcataagtatgatttcaaatttattgtttagaaaagtgcatagggcccgcagaagtcacaatgcagccctggatataayggccatgaaagtttatgtgctgaatcacaaagtggcaaaatatgaactggcagagatgtcggcctctgaggttagagaggtcatggccacagctgctgaa

SEQ ID NO: 20574 - DNA, 201 bp, Homo sapiens
ccccaaaggttaagcatccatactctaagtaaatttggaggccaggcacggtggcgcacgcctgtaatcccagcactttgtggggccgaaacaggcagctyatttgaggtcagtagtttgagaccagcctggccaacatgtgaaaccccgtctctactaaaaatacaaaaaatagccgggcgcagtggcacatgcctgtaa

SEQ ID NO: 20575 - DNA, 201 bp, Homo sapiens
tgtttgtctgtttgtgatggggtatctctctgtcacccaggctggagtgcagtggcaagagcatagctcactgcaacctcaaactcctgggctcaagtgawcctcctgcctgagtctcctgagtagctgcaactacaggcacatgccaccatgcccagctaatttttaaattatttttttgtagagaaaaagggccgtgcg

SEQ ID NO: 20576 - DNA, 201 bp, Homo sapiens
taagtgtgcaactcagaagcaaagcatccctgacaagctaagggaaggagaactctcagttggaaatacagagaggcccgctgccagctagaatcagtgcyacctttggccctaagtctgctcaacccacccaaaactagaccacctgccactcaaactcttttgtctgagtccctctctccccagggccccaatcaaaca

SEQ ID NO: 20577 - DNA, 201 bp, Homo sapiens
aaatacaaaaactagtggtacatgcctggagacccagctactcgggaggctgaggtgggaggatggctggaacccacggaggtcgaggctgcagtgaaccwtgatcttgccactccactccagcctgagtgacagagaccctgtctcaaagaaagagagaaagagagagagagaaggagttttgctttgttgcccaggctg

SEQ ID NO: 20578 - DNA, 201 bp, Homo sapiens
tgattgcaccactgcatgctagcctaggcaaggggagtgagaccctatctcaaaaacaaaaaacaaacaaaaaaagagaggccagagcgaagtacacaaamtggattgacctgctcctgccaactgagggaaagccagacagggtgatatgctggctctcgctgaagctgagagctgtgttcattctaccatcctggccgt

SEQ ID NO: 20579 - DNA, 201 bp, Homo sapiens
aagaattagggaggaatttaaatggagagcctactacatggttaaaaaaaacatgccaagattcaacctgagaaagctgattgaaaaaaaaaatttttttwaataaaatatgccaagaaacatgctaagcacattttaccattcactcaattatcataatgatgctggaagcatttattctcatttttaagatgaagaact

SEQ ID NO: 20580 - DNA, 201 bp, Homo sapiens
gacacacacgcctcacccatcaacattggcgtctaccatccccacaccagcaatgactggaccgggctggccctggccatcttcagctcttcccaaggacycaagacaagcatccatccccattcagggtctctaaagtggtcctccacctttcagccctatctgccctcccccagtcacttcaaggacaaagagattcct

SEQ ID NO: 20581 - DNA, 201 bp, Homo sapiens
gtctgtaagttatttttattttatttcacaagttattttttaaccataagttacagatgctaaaaatataagcccaaagctgaaaagcagctccaagggtrtgacaggccagaggacccaccccacagccctccctctatacatgatctcccacgcggtggctcacgcctgtaaccccagcagttgggagaccgaggcggg

SEQ ID NO: 20582 - DNA, 201 bp, Homo sapiens
ctctgaggttagagaggtcatggccacagctgctgaatgtgactttgggttgcccatccaggagattgggtggcagggagagcaaatgtgatcatgaaggkgctggttgtatcacgctggtcaaatgcatacaaaggagtctgtttagacagaagcgaagaagggaaagcaagcggacacctcctgggggcctcaggatcc

SEQ ID NO: 20583 - DNA, 201 bp, Homo sapiens
agcactttgggaggccgaggcgggtggatcacgaggtcaggagatcgaaaccatcctggctaacacggtgaaaccccgtctctactaaaaataaaaaaaawtagccgggcgtggtggcgggcacctgtagtcccagcttctcaggaatctgaggcaggagaatcgcttgaacccgggaggcggaggttgcagtgagccgag

SEQ ID NO: 20584 - DNA, 201 bp, Homo sapiens
agaaggaagcaaggtcctggaggcaaggccagtgctttgtgctgggggaaggacagagggtgagaaatcaccccaaatcatgggagaacccgacaaattcwgagactcaaggccaccgaagagagacaaccagtcctcacaggtatctggggtcccttccaacttgggatatcaagcagatcccttggagggtttatgttc

SEQ ID NO: 20585 - DNA, 201 bp, Homo sapiens
aatcccatctctacaaaaaatacaaaaactagtggtacatgcctggagacccagctactcgggaggctgaggtgggaggatggctggaacccacggaggtygaggctgcagtgaaccttgatcttgccactccactccagcctgagtgacagagaccctgtctcaaagaaagagagaaagagagagagagaaggagttttg

SEQ ID NO: 20586 - DNA, 201 bp, Homo sapiens
ttgggaggccgaggcgggtggatcacgaggtcaggagatcgaaaccatcctggctaacacggtgaaaccccgtctctactaaaaataaaaaaaaatagccrggcgtggtggcgggcacctgtagtcccagcttctcaggaatctgaggcaggagaatcgcttgaacccgggaggcggaggttgcagtgagccgagattgtg

SEQ ID NO: 20587 - DNA, 201 bp, Homo sapiens
tagtcccagctatccgggaggctgaggcaggagaattgcttgaacctgggaggcaggggctgcagtgagccgagatggcgccactgtactccagcctgggygacagagcgagactctgtctcaaaaaacaaaaaaaaacatgatctccctgtgcgccccatcccaaaccctcctctccttcgccaccatgccagcgcacaa

SEQ ID NO: 20588 - DNA, 201 bp, Homo sapiens
atacctcttggttggtacactgggccctcagccacagaaaattggttctcagggacagagataacccaagctaagccaatcagattgtctctccatgactytgaaccatggggcccagagacacagaggtcaagagcagctctgctgagcggtgagtatccacactccagggacaaagtccatgagcccctgaggttccca

SEQ ID NO: 20589 - DNA, 201 bp, Homo sapiens
gttatttttattttatttcacaagttattttttaaccataagttacagatgctaaaaatataagcccaaagctgaaaagcagctccaagggtgtgacaggmcagaggacccaccccacagccctccctctatacatgatctcccacgcggtggctcacgcctgtaaccccagcagttgggagaccgaggcgggaggatcat

SEQ ID NO: 20590 - DNA, 201 bp, Homo sapiens
gtgttcattctaccatcctggccgtgtggggagagccctaaaggagaagcccatgtagatatccttggtctttattcaaggactagcaggacaggtcttcyctactgagatggcagtctgctgtcagtgccagttcccatgaaactactctgaagatgaaagaaaagataacagaaggccagttataagcacttaaggtga

SEQ ID NO: 20591 - DNA, 201 bp, Homo sapiens
ctactaaaaataaaaaaaaatagccgggcgtggtggcgggcacctgtagtcccagcttctcaggaatctgaggcaggagaatcgcttgaacccgggaggcrgaggttgcagtgagccgagattgtgccactgcactccagcctgggcgacacagcgagactccatctcaaaaaaaaaaaagagaggccagataatcccagc

SEQ ID NO: 20592 - DNA, 201 bp, Homo sapiens
agagagaaagagagagagagaaggagttttgctttgttgcccaggctgagagccttgttttgactcactccctcctctgtctcatctccacccccacctgycctggtccattcaaaactacaaacctcagcatgcaagacagccaagggagggcaagaacagctctgtgtagcccatggccttctaggatatgtggtgctc

SEQ ID NO: 20593 - DNA, 201 bp, Homo sapiens
gccaggcccgccccgaggccgcggatgcgaaaccgggacacaaaggcacgcactcttgattctggcgcccgcgaggaagagggttgaggaagaggaaattrggatgaggccctggaacacgttttaatgcagcgccctgacaggcaggagccaggcaatactgcttgggaatgtgaagccccatgggcaccagctaggggg

SEQ ID NO: 20594 - DNA, 201 bp, Homo sapiens
aacatggtgcaaccccgtctctaataaaaatacaaaattagctgggtgtggtggcacatgcctgtaatcccagctacttgggaggctgaagcaggagaatmgcttgaacccaggaggtggaggttgaagtgaaccaagattatgccatcgtactccagcctaggcaacaagagcaaaactccatctcaaagaaaaaaaaga

SEQ ID NO: 20595 - DNA, 201 bp, Homo sapiens
gtgagccaccacacctggcccctttcagggattttaaaccacccaccttcccaaaccctcttctagaggaccctatcccatctcccaaactccctccctaraaccttaagaaaccttccacacatttaccccaatacatcataaaagaatctctctaagattgtgggtagatttttatttggggtaagaggagggcatgga

SEQ ID NO: 20596 - DNA, 201 bp, Homo sapiens
agagcaagtattatcccactttgcaggtgaagaaactgatgctgaggttaagtgtgcaactcagaagcaaagcatccctgacaagctaagggaaggagaastctcagttggaaatacagagaggcccgctgccagctagaatcagtgccacctttggccctaagtctgctcaacccacccaaaactagaccacctgccact

SEQ ID NO: 20597 - DNA, 201 bp, Homo sapiens
gaggttaagtgtgcaactcagaagcaaagcatccctgacaagctaagggaaggagaactctcagttggaaatacagagaggcccgctgccagctagaatcrgtgccacctttggccctaagtctgctcaacccacccaaaactagaccacctgccactcaaactcttttgtctgagtccctctctccccagggccccaatc

SEQ ID NO: 20598 - DNA, 201 bp, Homo sapiens
gaaacatgtttgttgggtttggggtttgtttgtttctatagatttgcagttctaaaagtaaggaaaacctgcaggtattaatacaaataaccacaactggraagggatggaattataagaaatctctcccagcattagtaataccagtatgccttatttcatgaggagagcaggccgattacctgacccaacaatatagcc

SEQ ID NO: 20599 - DNA, 201 bp, Homo sapiens
gttaagtgtgcaactcagaagcaaagcatccctgacaagctaagggaaggagaactctcagttggaaatacagagaggcccgctgccagctagaatcagtrccacctttggccctaagtctgctcaacccacccaaaactagaccacctgccactcaaactcttttgtctgagtccctctctccccagggccccaatcaaa

SEQ ID NO: 20600 - DNA, 201 bp, Homo sapiens
gctcgacagaaagaagctccagtgtggccctgatgctccctgctgaccacaccacacttgcaggaaaatgggctaaacaaccacaaaacaaggtggccacmagctactacacagaaacttatttctgaggcagctggagccctttgtttgtttgtttgtctgtttgtgatggggtatctctctgtcacccaggctggagtg

SEQ ID NO: 20601 - DNA, 201 bp, Homo sapiens
gcagttctaaaagtaaggaaaacctgcaggtattaatacaaataaccacaactgggaagggatggaattataagaaatctctcccagcattagtaataccrgtatgccttatttcatgaggagagcaggccgattacctgacccaacaatatagcccaggcccgggggagatgtgaacacaatgaggaagatatctctatg

SEQ ID NO: 20602 - DNA, 201 bp, Homo sapiens
tgccatttcaggggcaaagtcccagatgagcagcccaaggttacagcagtgaggcagtggaggcctcccgggagtaagggcttctcttggcccctgagacratactagagtttatggtctgggaaagggaggcagaagaccagacacattggtctcaagggacaggggctgagatgactcacatcagcgccattgggtcca

SEQ ID NO: 20603 - DNA, 201 bp, Homo sapiens
ttcgccaccatgccagcgcacaattccatcatatcacttgccttttcaaacaccatctatgactcttagtttttgggttcaagttcaactccttccataakcagtcaatacttttcagaatttggcccctccaacaagagtttatgttctgccccaatcaaacccaaagtagttccctaaagcctctgcctttctcttccc

SEQ ID NO: 20604 - DNA, 201 bp, Homo sapiens
ttggtacactgggccctcagccacagaaaattggttctcagggacagagataacccaagctaagccaatcagattgtctctccatgactttgaaccatggrgcccagagacacagaggtcaagagcagctctgctgagcggtgagtatccacactccagggacaaagtccatgagcccctgaggttcccagaactgctctc

SEQ ID NO: 20605 - DNA, 201 bp, Homo sapiens
gtaatcccagcactttgggaggccgaggcgggtggatcacgaggtcaggagatcgaaaccatcctggctaacacggtgaaaccccgtctctactaaaaatwaaaaaaaatagccgggcgtggtggcgggcacctgtagtcccagcttctcaggaatctgaggcaggagaatcgcttgaacccgggaggcggaggttgcagt

SEQ ID NO: 20606 - DNA, 201 bp, Homo sapiens
tgaggaaaccccgtctctattaaaaatacaaaaattagccaggcgtggcagtgcacacctgtagtcccagctatccgggaggctgaggcaggagaattgcytgaacctgggaggcaggggctgcagtgagccgagatggcgccactgtactccagcctgggcgacagagcgagactctgtctcaaaaaacaaaaaaaaaca

SEQ ID NO: 20607 - DNA, 201 bp, Homo sapiens
ccaagatgctctttgcccccacattccctcttccctcccagccctccccatcatgctcttagtctcctggtcctcctccctcccagagccctagaatctarccctactgctggattctactgcagcatcctactgctgcagcccactttcatcacgtgacacctctgcccccaacagtaaccccaggccctctgactggag

SEQ ID NO: 20608 - DNA, 201 bp, Homo sapiens
ctgcaggggaaggacaggactcagaggagcggggaggcaaggtcccaagtccacaggagcctcgggttactacaggaggggcagtcttgtgggaatactargacattcagagccctggaagtatggggaggaggtactggtggtgacaggacaaatgggggaccctgaggactatgcttgttaggctggtagttccatgga

SEQ ID NO: 20609 - DNA, 201 bp, Homo sapiens
tttctctcccctgcactcaccgtggggccccgttctccccgaggccctgacttccccgacaggccctggtgggaatgaagcagagagaacattacccaggktgagactccccacagaccccctctacacctctccagcccttcccttctcacgccctcccaccccccagcttacccgggctcccttctctccactggcacc

SEQ ID NO: 20610 - DNA, 201 bp, Homo sapiens
cccgcccacagccaccgaagggaaaccccaccctcagtctccacctggggagggaggcgggaaccctccctctatcgctcgctctctcctgccccttgtargtctcaacggcctgtaccctaagattctcttttcgggaaccccaatatcttccctagccccttccttttctaggacccaaacgtccagtcacacacactc

SEQ ID NO: 20611 - DNA, 201 bp, Homo sapiens
cccaccctcagtctccacctggggagggaggcgggaaccctccctctatcgctcgctctctcctgccccttgtaggtctcaacggcctgtaccctaagatwctcttttcgggaaccccaatatcttccctagccccttccttttctaggacccaaacgtccagtcacacacactccctcccattccctccctcttgggggc

SEQ ID NO: 20612 - DNA, 201 bp, Homo sapiens
tcagtctccacctggggagggaggcgggaaccctccctctatcgctcgctctctcctgccccttgtaggtctcaacggcctgtaccctaagattctctttkcgggaaccccaatatcttccctagccccttccttttctaggacccaaacgtccagtcacacacactccctcccattccctccctcttgggggcccagagc

SEQ ID NO: 20613 - DNA, 201 bp, Homo sapiens
ttgccttgtgtcccccaccctgcgtgcacctcttgggccccacggaacctcggcggcggcgtccagggatcgcgtccggagctcccaaccggatacccccyccaagcccgaaacggcgctgcccatcctcatacagtcacctcagtccagaaaacagcgattttaatttgaaagcgattttatgtatgagaggggaaagga

SEQ ID NO: 20614 - DNA, 201 bp, Homo sapiens
cctcttgggccccacggaacctcggcggcggcgtccagggatcgcgtccggagctcccaaccggataccccccccaagcccgaaacggcgctgcccatccycatacagtcacctcagtccagaaaacagcgattttaatttgaaagcgattttatgtatgagaggggaaaggagccccaaagagaagggacgcagggcaaa

SEQ ID NO: 20615 - DNA, 201 bp, Homo sapiens
cttggagtccctcttggatgtgtgctcctccagtgtgagaagcaccacgtctgggtctgagctcaggccagttgatggggagcctcaagcatctccatgargaaggtgtcgatgggggtgtcaccaatgagcttgaagaaaaacagatgctctagacacttaaggccaatggaccggagggcaggaagacgtagcagcagc

SEQ ID NO: 20616 - DNA, 201 bp, Homo sapiens
ctcaccttggctcccttccctccttgtcgcccctcggaaccaggcgagccagcaggaccctgcaggtggagtgggaaggaagagcacatgaggccgtgggmagccaggctcaactcttcccccttcctgtcctagacacacacatacacatgcacacacacacgtgcatacacagggacacgcgccgagggccgattcaca

SEQ ID NO: 20617 - DNA, 201 bp, Homo sapiens
gaagcagccccactcaccctcgcctgctgcaggatcgcctgggcctgagcctcctgggccgccaccacagggcccttgtcacccccaccactgccaaaccrgaactgagggcaaggagagaaggtccaggttctcttccaagaaagccatgggaccctcccagccagaggctttctccagcgtttctgccccttgccccag

SEQ ID NO: 20618 - DNA, 201 bp, Homo sapiens
aacaaaaaattatttcaccaagaagaaatgatagagaaacactgaaaatggacacaaggtagtagtttattgaccaaaagctttatgaaatccagcttcarttagacaggaagtgatcaagaaagacaggaagtggctacatattttttttttttaattcccaattgccctgagcttcagaagtatccacaagagtcacaa

SEQ ID NO: 20619 - DNA, 201 bp, Homo sapiens
ctgcctctgattgctctggttacctcaaagacttcttcatccagaatacgggcaccaaagatgatcactccatgggtgtccaatactggacgagcacttcrggggagaggccgggtgactcgcttcttgcagtcaacaatgagggtgacagactggcccttcacagccacagccacacggtgccacctggaaatggtggaa

SEQ ID NO: 20620 - DNA, 201 bp, Homo sapiens
cccagggacccaggtcggcctgagacgctggatgccctgaggctgacagaagacagggagcagactatgagcctcagacgccggggtcccagggaggtcakaggctgcgggcagcgacagctgtcagcggcccagctccatgcagcaaggcgccgtcggggctcccggcactgctccctcctcggtggctgccgcttctgt

SEQ ID NO: 20621 - DNA, 201 bp, Homo sapiens
gagggctctccacgccctggcccagggctccctagatagtgaggagccctcttgggaggtggcacagagctgatgttgtgggattccaggtgggcctggtwccgaatggacaggatcagacagagacggtcctatcccatgaagcagacaggccccagcagcacccctccccgcctcggtggggctcccaggtctgagaag

SEQ ID NO: 20622 - DNA, 201 bp, Homo sapiens
ggggcaggggaggggcagcgaggggccagctctcacctgcgtgacgtcatccctaggcgtcacacaggtctcaccccctgctgtgaagttgcagaaaactyggaaggcatcccgagcacagccctggttggggtcgacccagtactctcctgttgggtgagggagaggggaggtcagggccacctaggtccaggctccaag

SEQ ID NO: 20623 - DNA, 201 bp, Homo sapiens
gtggcccgtctcctgccccagaaactaaaaaggttcacccctggcccacagaaaagctggccagcccctcctccagtttccattctgctttgtcagtaacsaccactacccctggtgaaaacatacacaccagaacccaggaacaaacatgcccgagataccgcacacccatcaacccaccagctcctgcacacacactcg

SEQ ID NO: 20624 - DNA, 201 bp, Homo sapiens
ctcctgcacacacactcgcccagtgcaatgagataccgcatacccttaaacccaccagctcctgcacacacaccctgccccgggcaatgagataccacacrcccttaaacccaccagctcctgcacacacacacacccagggcaatgcagacaccaggcacctccccacccatcccacctgccattgcccagcctccaccc

SEQ ID NO: 20625 - DNA, 201 bp, Homo sapiens
cccaacacacctgtaggccaatgggtcctgggggcccattgaatcctcttgttccttcatcacctttggctccaaagtgtccctggggtccccgagctccrggctccccatctgctccctgcagggttgagggaaagcagagacaaggacacagggatgggtcatgggtcaggtgttctctatccacaaataccacacaca

SEQ ID NO: 20626 - DNA, 201 bp, Homo sapiens
tgtggggtcccctcaccttgtctccatcctctccagccacacctggaggcccagcaggaccaggaagccccacaggaccctgcactccatctcggccagtygggccaatggggcccttctcaccctgtgggacaggaggaaggagtcatggcctggaggtgaccctcaccctcaaacaccccacaggaaacttgtcatagc

SEQ ID NO: 20627 - DNA, 201 bp, Homo sapiens
gacttcacgaaaagagaagggtgagagctggagagggaagacaggctccaaaagatggaagtggggagtgacatggagggggtcagggacagggtcggggkggggactcaggatgcttggtgcttgtgacaggcaggggtctgggagtcacactcacagcagtgcctgggaggcctctctctcctgggaatcccctcagac

SEQ ID NO: 20628 - DNA, 201 bp, Homo sapiens
gccactgctgggttttctcctgccccatgtggagtaactacaccaccttgtgtctctgttggggaactgcctctcctgggggacaagacgatgagaatgcsccccaaaacagactgaagttcaggacccctgcctgaaatcccagcccccaccattgaccccagccccaggagtctgggtcaggtggaccggggcaggggc

SEQ ID NO: 20629 - DNA, 201 bp, Homo sapiens
ttcggtccaggaaacccgttgggaccctgaggtccagggaggccctagagacagaggtggggggagtcaggagaatgggggcaggggctgagtgggggaaytcagcttccttcctggggtgaggagggagctggctcacccaggctccctggggacctcaggggaaggggactttcgatccacactcaccctctctccagg

SEQ ID NO: 20630 - DNA, 201 bp, Homo sapiens
gcttccttcctggggtgaggagggagctggctcacccaggctccctggggacctcaggggaaggggactttcgatccacactcaccctctctccagggggsccatgggggccatcaccaccagatgttccctgtggggggaaacagagtcaaggagtgggaagagctgctttccagctgtccccgaggtcaggatgttgag

SEQ ID NO: 20631 - DNA, 201 bp, Homo sapiens
gaacattacccagggtgagactccccacagaccccctctacacctctccagcccttcccttctcacgccctcccaccccccagcttacccgggctcccttytctccactggcaccaggaaagccaggaaatcctagggacccctggtgagaacggagaaggggggaaattgagaagttatgaaaggtagggttcaggaagg

SEQ ID NO: 20632 - DNA, 201 bp, Homo sapiens
agctcctaagaccccatatagctcccctgaccacagccctttgtctcccagcctggtggtcagttaccttgacccctcgaggtcctgggtatcctagaggwccctgaggtccagagggaccctggaagataaaagagaggcatttataaaggggcctcagagtgtcactgtgggggcctccaggggtggaagaaatggaag

SEQ ID NO: 20633 - DNA, 201 bp, Homo sapiens
gactatgagcctcagacgccggggtcccagggaggtcagaggctgcgggcagcgacagctgtcagcggcccagctccatgcagcaaggcgccgtcggggckcccggcactgctccctcctcggtggctgccgcttctgtgtgtccccggccaccctggcgcccagagcccccacctcgcccccgcccccggcccggccccc

SEQ ID NO: 20634 - DNA, 201 bp, Homo sapiens
gacgccggggtcccagggaggtcagaggctgcgggcagcgacagctgtcagcggcccagctccatgcagcaaggcgccgtcggggctcccggcactgctcyctcctcggtggctgccgcttctgtgtgtccccggccaccctggcgcccagagcccccacctcgcccccgcccccggcccggcccccgcctccagccgccc

SEQ ID NO: 20635 - DNA, 201 bp, Homo sapiens
cctccggccggccccgcccccagcctggcacaccctctccccccctccccgacaaagcttgccttgtgtcccccaccctgcgtgcacctcttgggccccayggaacctcggcggcggcgtccagggatcgcgtccggagctcccaaccggataccccccccaagcccgaaacggcgctgcccatcctcatacagtcacctc

SEQ ID NO: 20636 - DNA, 201 bp, Homo sapiens
gtaaagggaaggcctccgggactacactcgtgaaaccatcccctgtgggggccctgtcctcacagcccaggccccttccccaagttagacaggaagagatrgggggggcggcgggaagctgggaaggctagtgcttggagagccctagggacaggccatttcagggccctgcctttcccaaacacccacctccaccactgg

SEQ ID NO: 20637 - DNA, 201 bp, Homo sapiens
catcctcatagcactccccacccccaagggagcctcagtgccccccagccccatctcaccgtccctgctgctcagggtacttctgtttgcagtaggtctcmagtgatgcatacactttctcccgcaggacctccacctcactagggttggagaggcccttggcatctgggatggcagggaagagaggaggaagagaaatga

SEQ ID NO: 20638 - DNA, 201 bp, Homo sapiens
caaagatggctcctactcctgctgaatgggctgagttgcggtgcacgtgaagacctgtggcaaggaggatgccatctcgaacatcaatggatcggtgtgaraaggaggcaatgaggagttcattccagcctgggtggggcagcaagggtcaggagccagaaatcaggccaagggattcaaagcacatcagtggaagagaag

SEQ ID NO: 20639 - DNA, 100 bp, Homo sapiens
agctgctgctacgtcttcctgccctccggtccattggccttaagtgtctrgagcatctgtttttcttcaagctcattggtgacacccccatcgacacctt

SEQ ID NO: 20640 - DNA, 201 bp, Homo sapiens
gccccccaccctgccccagggcttggagtccctcttggatgtgtgctcctccagtgtgagaagcaccacgtctgggtctgagctcaggccagttgatgggragcctcaagcatctccatgaggaaggtgtcgatgggggtgtcaccaatgagcttgaagaaaaacagatgctctagacacttaaggccaatggaccggagg

SEQ ID NO: 20641 - DNA, 201 bp, Homo sapiens
cacatcagcgccattgggtccagctggacctcgaggtcctggggggccaggtggtccctgggggaaacagatacaccacagatgaggaagggaagtgagayggctgagcatgaatggtggagagaggaggaggagcagccaggccagggagttggcagtggggtgtggggtgggggctggccagggaggggggtgactagt

SEQ ID NO: 20642 - DNA, 201 bp, Homo sapiens
atgggaccctcccagccagaggctttctccagcgtttctgccccttgccccaggttctgcccatccagcatttcccatggcttccagataatcacttagargattccagaaactcaactcctgccctcctccactgtccagcctctgcctccagaaagactctcttttggttctagagctcctgaaatataggctgttctg

SEQ ID NO: 20643 - DNA, 201 bp, Homo sapiens; identical to SEQ ID NO: 13039

SEQ ID NO: 20644 - DNA, 201 bp, Homo sapiens; identical to SEQ ID NO: 13040

SEQ ID NO: 20645 - DNA, 201 bp, Homo sapiens; identical to SEQ ID NO: 13041

SEQ ID NO: 20646 - DNA, 201 bp, Homo sapiens; identical to SEQ ID NO: 13042

SEQ ID NO: 20647 - DNA, 201 bp, Homo sapiens; identical to SEQ ID NO: 13043

SEQ ID NO: 20648 - DNA, 201 bp, Homo sapiens; identical to SEQ ID NO: 13044

SEQ ID NO: 20649 - DNA, 201 bp, Homo sapiens; identical to SEQ ID NO: 13045

SEQ ID NO: 20650 - DNA, 201 bp, Homo sapiens; identical to SEQ ID NO: 13046

SEQ ID NO: 20651 - DNA, 201 bp, Homo sapiens
agacaatggctgcattttcttttaaataaactttttattttggaataattttagatttacagaaaagttacaaagagagtgcagagagctctgggagatcytccattcagcttcctccaaggctaacttcctacatgaagagggtatatttgtcacagtaagggattgatattggtattactgtggactaaactccagact

SEQ ID NO: 20652 - DNA, 201 bp, Homo sapiens
acaaagagagtgcagagagctctgggagatcttccattcagcttcctccaaggctaacttcctacatgaagagggtatatttgtcacagtaagggattgayattggtattactgtggactaaactccagactttggctttcatctttttttccctcgaatgcccgtttctgttccagggtaccccatcgctgcgggcatgg

SEQ ID NO: 20653 - DNA, 201 bp, Homo sapiens
gttctccaatatgttacaaagactgtttttgcccagtcacaaattcaaacctaggtctccaatctgagagaggaaagtgaagctttccgtaccacagaacrgatgtattttggggtggtccgtgagacgggtactgcagtagctcctcccggctgcacctaccatcagcctgcagccatttactctgatgccttccctggt

SEQ ID NO: 20654 - DNA, 201 bp, Homo sapiens
tatgatgttagacatcagggcataacccaatgcctgtgaatatgtacccagcacagtactcaaaaatgcaagggccatttatggagcatccatgagccatyctgcttggtgctggccgtgagactgcagaggggagtccctgctccagactgtatgtggggggcatgtggagtggggattgtcaatcacacacataaaaga

SEQ ID NO: 20655 - DNA, 201 bp, Homo sapiens
gtctggaagcctcactgcaaacggctgcagctgcctgcaggagtgaagagtggcttctgcctgtgtccagcaactcccagtctggccacagtgaccagacragccttgaacatgctcttgagaagtgggctgcctgaggcactggggagaaaccactgtggctttttctgatgagcatagggactccagggtccaattatc

SEQ ID NO: 20656 - DNA, 201 bp, Homo sapiens
ctgacctctgtttcctctctggtccaatttttccgacctcccctgttctcgccactctaattccatggccccaggtgctcctcagataggctggctcctgycaccccgcttggggctttgggactcactgtgccctctggaatgttctccttccgcatcagcccgccccctccctcacttcctacaatcccacacccagcc

SEQ ID NO: 20657 - DNA, 201 bp, Homo sapiens
tcgcttcatcctgcagtcccctatacccttcccagcctctcataaccaccaatctactatttccatgagatccactttttaagctcccacatatgagtgaraacatgcgatatttgtctttgtgcctggcttatttcacttaacataatgacctccagttccatccatgttgctgcaaataacaagatttcattcttttta

SEQ ID NO: 20658 - DNA, 201 bp, Homo sapiens
acacttagattgattccatattttggctattgtgaatagggctgcaataaacatgggagtgcagatatttcttcaatgtattgatttgctttcttttggakatatacacagtagtggaaaggttggattttatggtagttctatgtttatttttttgagaaaccgccattgtgttgcctatagtggctgtactgatgccca

SEQ ID NO: 20659 - DNA, 201 bp, Homo sapiens; identical to SEQ ID NO: 13069

SEQ ID NO: 20660 - DNA, 201 bp, Homo sapiens; identical to SEQ ID NO: 13070

SEQ ID NO: 20661 - DNA, 201 bp, Homo sapiens; identical to SEQ ID NO: 13071

SEQ ID NO: 20662 - DNA, 201 bp, Homo sapiens; identical to SEQ ID NO: 13072

SEQ ID NO: 20663 - DNA, 201 bp, Homo sapiens; identical to SEQ ID NO: 13073

SEQ ID NO: 20664 - DNA, 201 bp, Homo sapiens; identical to SEQ ID NO: 13074

SEQ ID NO: 20665 - DNA, 201 bp, Homo sapiens; identical to SEQ ID NO: 13075

SEQ ID NO: 20666 - DNA, 201 bp, Homo sapiens; identical to SEQ ID NO: 13076

SEQ ID NO: 20667 - DNA, 201 bp, Homo sapiens; identical to SEQ ID NO: 13077

SEQ ID NO: 20668 - DNA, 201 bp, Homo sapiens; identical to SEQ ID NO: 13078

SEQ ID NO: 20669 - DNA, 201 bp, Homo sapiens; identical to SEQ ID NO: 13079

SEQ ID NO: 20670 - DNA, 201 bp, Homo sapiens; identical to SEQ ID NO: 13080

SEQ ID NO: 20671 - DNA, 201 bp, Homo sapiens; identical to SEQ ID NO: 13081

SEQ ID NO: 20672 - DNA, 201 bp, Homo sapiens; identical to SEQ ID NO: 13120

SEQ ID NO: 20673 - DNA, 201 bp, Homo sapiens
ttcatagttttcatcttacagatctttcacttctttagataaattgagtcctaggtattttatattcttcatagctattatacatgggtttgctttttaatttttttttagattgttcactgttggcatatataaatagtactgacttttgcatgttgattttgtatcctgcaactttactgaattcgtttattagttcta

SEQ ID NO: 20674 - DNA, 201 bp, Homo sapiens
ttttagattgttcactgttggcatatataaatagtactgacttttgcatgttgattttgtatcctgcaactttactgaattcgtttattagttctaaacatttttttttttggtggagttcttaggtttttctaactatcagatcatgttgtctgcaaacaagactaatataacttcctccttcccaatttggatgccttt

SEQ ID NO: 20675 - DNA, 201 bp, Homo sapiens
tagtactgacttttgcatgttgattttgtatcctgcaactttactgaattcgtttattagttctaaacatttttttttttggtggagttcttaggtttttctaactatcagatcatgttgtctgcaaacaagactaatataacttcctccttcccaatttggatgccttttatttctttctcttgcctgattgctctggct

SEQ ID NO: 20676 - DNA, 201 bp, Homo sapiens
agtactgacttttgcatgttgattttgtatcctgcaactttactgaattcgtttattagttctaaacatttttttttttggtggagttcttaggtttttctaactatcagatcatgttgtctgcaaacaagactaatataacttcctccttcccaatttggatgccttttatttctttctcttgcctgattgctctggcta

SEQ ID NO: 20677 - DNA, 201 bp, Homo sapiens
gtactgacttttgcatgttgattttgtatcctgcaactttactgaattcgtttattagttctaaacatttttttttttggtggagttcttaggtttttctaactatcagatcatgttgtctgcaaacaagactaatataacttcctccttcccaatttggatgccttttatttctttctcttgcctgattgctctggctag

SEQ ID NO: 20678 - DNA, 201 bp, Homo sapiens
tactgacttttgcatgttgattttgtatcctgcaactttactgaattcgtttattagttctaaacatttttttttttggtggagttcttaggtttttctaactatcagatcatgttgtctgcaaacaagactaatataacttcctccttcccaatttggatgccttttatttctttctcttgcctgattgctctggctagg

SEQ ID NO: 20679 - DNA, 201 bp, Homo sapiens
tgcaaacaagactaatataacttcctccttcccaatttggatgccttttatttctttctcttgcctgattgctctggctaggacttccagtactatgcttraataaaagtggtgaaaatgggcatccttgtttagttccaaaccttaaagggaaggttctgaaattttcccaattcaatatgatgttaactgtgggtttgt

SEQ ID NO: 20680 - DNA, 201 bp, Homo sapiens; identical to SEQ ID NO: 13131

SEQ ID NO: 20681 - DNA, 201 bp, Homo sapiens; identical to SEQ ID NO: 13132

SEQ ID NO: 20682 - DNA, 201 bp, Homo sapiens; identical to SEQ ID NO: 13133

SEQ ID NO: 20683 - DNA, 201 bp, Homo sapiens; identical to SEQ ID NO: 13134

SEQ ID NO: 20684 - DNA, 201 bp, Homo sapiens
ttactgaaaactatagtcaccttactgatctctaatgctcagtcttatttcttctatcaaactatacatctgtatccattaatcaacctcgcttcatcctrcagtcccctatacccttcccagcctctcataaccaccaatctactatttccatgagatccactttttaagctcccacatatgagtgagaacatgcgatat

SEQ ID NO: 20685 - DNA, 201 bp, Homo sapiens
aaaactatagtcaccttactgatctctaatgctcagtcttatttcttctatcaaactatacatctgtatccattaatcaacctcgcttcatcctgcagtcycctatacccttcccagcctctcataaccaccaatctactatttccatgagatccactttttaagctcccacatatgagtgagaacatgcgatatttgtct

SEQ ID NO: 20686 - DNA, 201 bp, Homo sapiens; identical to SEQ ID NO: 13172

SEQ ID NO: 20687 - DNA, 201 bp, Homo sapiens; identical to SEQ ID NO: 13173

SEQ ID NO: 20688 - DNA, 201 bp, Homo sapiens; identical to SEQ ID NO: 13179

SEQ ID NO: 20689 - DNA, 201 bp, Homo sapiens; identical to SEQ ID NO: 13182

SEQ ID NO: 20690 - DNA, 201 bp, Homo sapiens; identical to SEQ ID NO: 13192

SEQ ID NO: 20691 - DNA, 201 bp, Homo sapiens; identical to SEQ ID NO: 13216

SEQ ID NO: 20692 - DNA, 201 bp, Homo sapiens; identical to SEQ ID NO: 13217

SEQ ID NO: 20693 - DNA, 201 bp, Homo sapiens; identical to SEQ ID NO: 13218

SEQ ID NO: 20694 - DNA, 201 bp, Homo sapiens; identical to SEQ ID NO: 13219

SEQ ID NO: 20695 - DNA, 201 bp, Homo sapiens; identical to SEQ ID NO: 13220

SEQ ID NO: 20696 - DNA, 201 bp, Homo sapiens; identical to SEQ ID NO: 13221

SEQ ID NO: 20697 - DNA, 201 bp, Homo sapiens; identical to SEQ ID NO: 13222

SEQ ID NO: 20698 - DNA, 201 bp, Homo sapiens; identical to SEQ ID NO: 13223

SEQ ID NO: 20699 - DNA, 201 bp, Homo sapiens; identical to SEQ ID NO: 13224

SEQ ID NO: 20700 - DNA, 201 bp, Homo sapiens; identical to SEQ ID NO: 13225

SEQ ID NO: 20701 - DNA, 201 bp, Homo sapiens
attactgaaaactatagtcaccttactgatctctaatgctcagtcttatttcttctatcaaactatacatctgtatccattaatcaacctcgcttcatccygcagtcccctatacccttcccagcctctcataaccaccaatctactatttccatgagatccactttttaagctcccacatatgagtgagaacatgcgata

SEQ ID NO: 20702 - DNA, 201 bp, Homo sapiens
ttttaaatgggatgagatggcatctcactgtggttttgattcacatttctgtgattattagtgatgttgagcatttttttacaaacctgtttgccatttgkatgtattcttttgagaaatatatattcagatcttttgcccatttttaaatgagatcatttgggttttttgctttttttttgccactgagttgtttgagct

SEQ ID NO: 20703 - DNA, 201 bp, Homo sapiens
tcttacagatctttcacttctttagataaattgagtcctaggtattttatattcttcatagctattatacatgggtttgctttttaatttttttttagatygttcactgttggcatatataaatagtactgacttttgcatgttgattttgtatcctgcaactttactgaattcgtttattagttctaaacattttttttt

SEQ ID NO: 20704 - DNA, 201 bp, Homo sapiens; identical to SEQ ID NO: 13249

SEQ ID NO: 20705 - DNA, 201 bp, Homo sapiens; identical to SEQ ID NO: 5151

SEQ ID NO: 20706 - DNA, 201 bp, Homo sapiens; identical to SEQ ID NO: 5152

SEQ ID NO: 20707 - DNA, 201 bp, Homo sapiens; identical to SEQ ID NO: 5153

SEQ ID NO: 20708 - DNA, 201 bp, Homo sapiens; identical to SEQ ID NO: 5153

SEQ ID NO: 20709 - DNA, 201 bp, Homo sapiens; identical to SEQ ID NO: 5155

SEQ ID NO: 20710 - DNA, 201 bp, Homo sapiens; identical to SEQ ID NO: 512

SEQ ID NO: 20711 - DNA, 201 bp, Homo sapiens; identical to SEQ ID NO: 512

SEQ ID NO: 20712 - DNA, 201 bp, Homo sapiens; identical to SEQ ID NO: 513

SEQ ID NO: 20713 - DNA, 201 bp, Homo sapiens; identical to SEQ ID NO: 513

SEQ ID NO: 20714 - DNA, 201 bp, Homo sapiens; identical to SEQ ID NO: 5160

SEQ ID NO: 20715 - DNA, 201 bp, Homo sapiens; identical to SEQ ID NO: 5161

SEQ ID NO: 20716 - DNA, 201 bp, Homo sapiens; identical to SEQ ID NO: 5162

SEQ ID NO: 20717 - DNA, 201 bp, Homo sapiens; identical to SEQ ID NO: 5163

SEQ ID NO: 20718 - DNA, 201 bp, Homo sapiens; identical to SEQ ID NO: 5164

SEQ ID NO: 20719 - DNA, 201 bp, Homo sapiens; identical to SEQ ID NO: 511

SEQ ID NO: 20720 - DNA, 201 bp, Homo sapiens; identical to SEQ ID NO: 5166

SEQ ID NO: 20721 - DNA, 201 bp, Homo sapiens; identical to SEQ ID NO: 5167

SEQ ID NO: 20722 - DNA, 201 bp, Homo sapiens; identical to SEQ ID NO: 5168

SEQ ID NO: 20723 - DNA, 201 bp, Homo sapiens; identical to SEQ ID NO: 5168

SEQ ID NO: 20724 - DNA, 201 bp, Homo sapiens; identical to SEQ ID NO: 5170

SEQ ID NO: 20725 - DNA, 201 bp, Homo sapiens; identical to SEQ ID NO: 5171

SEQ ID NO: 20726 - DNA, 201 bp, Homo sapiens; identical to SEQ ID NO: 5172

SEQ ID NO: 20727 - DNA, 201 bp, Homo sapiens; identical to SEQ ID NO: 5173

SEQ ID NO: 20728 - DNA, 201 bp, Homo sapiens; identical to SEQ ID NO: 5174

SEQ ID NO: 20729 - DNA, 201 bp, Homo sapiens; identical to SEQ ID NO: 5175

SEQ ID NO: 20730 - DNA, 201 bp, Homo sapiens; identical to SEQ ID NO: 5176

SEQ ID NO: 20731 - DNA, 201 bp, Homo sapiens; identical to SEQ ID NO: 5177

SEQ ID NO: 20732 - DNA, 201 bp, Homo sapiens; identical to SEQ ID NO: 5178

SEQ ID NO: 20733 - DNA, 201 bp, Homo sapiens; identical to SEQ ID NO: 514

SEQ ID NO: 20734 - DNA, 201 bp, Homo sapiens; identical to SEQ ID NO: 514

SEQ ID NO: 20735 - DNA, 201 bp, Homo sapiens; identical to SEQ ID NO: 5181

SEQ ID NO: 20736 - DNA, 201 bp, Homo sapiens; identical to SEQ ID NO: 5182

SEQ ID NO: 20737 - DNA, 201 bp, Homo sapiens; identical to SEQ ID NO: 4302

SEQ ID NO: 20738 - DNA, 201 bp, Homo sapiens; identical to SEQ ID NO: 4304

SEQ ID NO: 20739 - DNA, 201 bp, Homo sapiens; identical to SEQ ID NO: 4305

SEQ ID NO: 20740 - DNA, 201 bp, Homo sapiens; identical to SEQ ID NO: 4309

SEQ ID NO: 20741 - DNA, 201 bp, Homo sapiens; identical to SEQ ID NO: 4310

SEQ ID NO: 20742 - DNA, 201 bp, Homo sapiens; identical to SEQ ID NO: 4310

SEQ ID NO: 20743 - DNA, 201 bp, Homo sapiens; identical to SEQ ID NO: 4312

SEQ ID NO: 20744 - DNA, 201 bp, Homo sapiens
cttcttttcaagttttgtaccatttgatctctttaaaatgatatgcacatattattttgactttaaaattttattggaaaattaaaaagcaaagtgaataraaaaatggaaagtgggatggtgaaagcaatgattgcacttaaagacagttaaagacaaatgtggtgcggtcaagtcagcttcatacctgggatgcaaggc

SEQ ID NO: 20745 - DNA, 201 bp, Homo sapiens
ctagaaattaaaagacaaaagagtaatgctttcaaaattctcaggggaaatgacttacaacttttaacttgatacctagtcaaaatattattcaagtaaakaatagaatatttaaaatgtcagacatgcaagaattcagaaagtttataatataagcatccttcttcaagttaattaatactccttcaacatggcagaaaa

SEQ ID NO: 20746 - DNA, 201 bp, Homo sapiens; identical to SEQ ID NO: 4313

SEQ ID NO: 20747 - DNA, 201 bp, Homo sapiens; identical to SEQ ID NO: 357

SEQ ID NO: 20748 - DNA, 201 bp, Homo sapiens; identical to SEQ ID NO: 358

SEQ ID NO: 20749 - DNA, 201 bp, Homo sapiens; identical to SEQ ID NO: 359

SEQ ID NO: 20750 - DNA, 201 bp, Homo sapiens; identical to SEQ ID NO: 356

SEQ ID NO: 20751 - DNA, 201 bp, Homo sapiens; identical to SEQ ID NO: 4318

SEQ ID NO: 20752 - DNA, 201 bp, Homo sapiens; identical to SEQ ID NO: 4319

SEQ ID NO: 20753 - DNA, 201 bp, Homo sapiens; identical to SEQ ID NO: 4322

SEQ ID NO: 20754 - DNA, 201 bp, Homo sapiens; identical to SEQ ID NO: 4323

SEQ ID NO: 20755 - DNA, 201 bp, Homo sapiens; identical to SEQ ID NO: 4324

SEQ ID NO: 20756 - DNA, 201 bp, Homo sapiens; identical to SEQ ID NO: 4325

SEQ ID NO: 20757 - DNA, 201 bp, Homo sapiens; identical to SEQ ID NO: 4326

SEQ ID NO: 20758 - DNA, 201 bp, Homo sapiens
agatatttgtgacaaacccacagccaatatcatactaaatgggcaaaagctggaagcattccctttgaaaaccagcacaagacaaggatgccctctctcamcactcctattcaacatagtattagaagttctggccagggcagtcaggcaagagaaagaaataaagggtattcaaacaggaaaagaggaaatcaaattgtc

SEQ ID NO: 20759 - DNA, 201 bp, Homo sapiens; identical to SEQ ID NO: 361

SEQ ID NO: 20760 - DNA, 201 bp, Homo sapiens; identical to SEQ ID NO: 4330

SEQ ID NO: 20761 - DNA, 201 bp, Homo sapiens; identical to SEQ ID NO: 4330

SEQ ID NO: 20762 - DNA, 201 bp, Homo sapiens; identical to SEQ ID NO: 4332

SEQ ID NO: 20763 - DNA, 201 bp, Homo sapiens; identical to SEQ ID NO: 4332

SEQ ID NO: 20764 - DNA, 201 bp, Homo sapiens; identical to SEQ ID NO: 4334

SEQ ID NO: 20765 - DNA, 201 bp, Homo sapiens; identical to SEQ ID NO: 354

SEQ ID NO: 20766 - DNA, 201 bp, Homo sapiens; identical to SEQ ID NO: 4336

SEQ ID NO: 20767 - DNA, 201 bp, Homo sapiens; identical to SEQ ID NO: 4336

SEQ ID NO: 20768 - DNA, 201 bp, Homo sapiens; identical to SEQ ID NO: 355

SEQ ID NO: 20769 - DNA, 201 bp, Homo sapiens; identical to SEQ ID NO: 4342

SEQ ID NO: 20770 - DNA, 201 bp, Homo sapiens; identical to SEQ ID NO: 4343

SEQ ID NO: 20771 - DNA, 201 bp, Homo sapiens; identical to SEQ ID NO: 4344

SEQ ID NO: 20772 - DNA, 201 bp, Homo sapiens; identical to SEQ ID NO: 4345

SEQ ID NO: 20773 - DNA, 201 bp, Homo sapiens; identical to SEQ ID NO: 4346

SEQ ID NO: 20774 - DNA, 201 bp, Homo sapiens; identical to SEQ ID NO: 4347

SEQ ID NO: 20775 - DNA, 201 bp, Homo sapiens; identical to SEQ ID NO: 4348

SEQ ID NO: 20776 - DNA, 201 bp, Homo sapiens; identical to SEQ ID NO: 363

SEQ ID NO: 20777 - DNA, 201 bp, Homo sapiens; identical to SEQ ID NO: 362

SEQ ID NO: 20778 - DNA, 201 bp, Homo sapiens; identical to SEQ ID NO: 4351

SEQ ID NO: 20779 - DNA, 201 bp, Homo sapiens; identical to SEQ ID NO: 4352

SEQ ID NO: 20780 - DNA, 100 bp, Homo sapiens; identical to SEQ ID NO: 4353

SEQ ID NO: 20781 - DNA, 201 bp, Homo sapiens; identical to SEQ ID NO: 4354

SEQ ID NO: 20782 - DNA, 201 bp, Homo sapiens; identical to SEQ ID NO: 4355

SEQ ID NO: 20783 - DNA, 201 bp, Homo sapiens; identical to SEQ ID NO: 16012

SEQ ID NO: 20784 - DNA, 201 bp, Homo sapiens; identical to SEQ ID NO: 16105

SEQ ID NO: 20785 - DNA, 201 bp, Homo sapiens; identical to SEQ ID NO: 16144

SEQ ID NO: 20786 - DNA, 201 bp, Homo sapiens; identical to SEQ ID NO: 16145

SEQ ID NO: 20787 - DNA, 201 bp, Homo sapiens; identical to SEQ ID NO: 16164

SEQ ID NO: 20788 - DNA, 201 bp, Homo sapiens; identical to SEQ ID NO: 16164

SEQ ID NO: 20789 - DNA, 201 bp, Homo sapiens; identical to SEQ ID NO: 16202

SEQ ID NO: 20790 - DNA, 201 bp, Homo sapiens; identical to SEQ ID NO: 16203

SEQ ID NO: 20791 - DNA, 201 bp, Homo sapiens; identical to SEQ ID NO: 16204

SEQ ID NO: 20792 - DNA, 201 bp, Homo sapiens; identical to SEQ ID NO: 16205

SEQ ID NO: 20793 - DNA, 201 bp, Homo sapiens; identical to SEQ ID NO: 16205

SEQ ID NO: 20794 - DNA, 201 bp, Homo sapiens; identical to SEQ ID NO: 16207

SEQ ID NO: 20795 - DNA, 201 bp, Homo sapiens; identical to SEQ ID NO: 16207

SEQ ID NO: 20796 - DNA, 201 bp, Homo sapiens; identical to SEQ ID NO: 16209

SEQ ID NO: 20797 - DNA, 201 bp, Homo sapiens; identical to SEQ ID NO: 16210

SEQ ID NO: 20798 - DNA, 201 bp, Homo sapiens; identical to SEQ ID NO: 16274

SEQ ID NO: 20799 - DNA, 201 bp, Homo sapiens; identical to SEQ ID NO: 16274

SEQ ID NO: 20800 - DNA, 201 bp, Homo sapiens; identical to SEQ ID NO: 16276

SEQ ID NO: 20801 - DNA, 201 bp, Homo sapiens; identical to SEQ ID NO: 16276

SEQ ID NO: 20802 - DNA, 201 bp, Homo sapiens; identical to SEQ ID NO: 16282

SEQ ID NO: 20803 - DNA, 201 bp, Homo sapiens; identical to SEQ ID NO: 16282

SEQ ID NO: 20804 - DNA, 201 bp, Homo sapiens; identical to SEQ ID NO: 16765

SEQ ID NO: 20805 - DNA, 201 bp, Homo sapiens; identical to SEQ ID NO: 16765

SEQ ID NO: 20806 - DNA, 201 bp, Homo sapiens; identical to SEQ ID NO: 16814

SEQ ID NO: 20807 - DNA, 201 bp, Homo sapiens; identical to SEQ ID NO: 16815

SEQ ID NO: 20808 - DNA, 201 bp, Homo sapiens; identical to SEQ ID NO: 17002

SEQ ID NO: 20809 - DNA, 201 bp, Homo sapiens; identical to SEQ ID NO: 17002

SEQ ID NO: 20810 - DNA, 201 bp, Homo sapiens; identical to SEQ ID NO: 17004

SEQ ID NO: 20811 - DNA, 201 bp, Homo sapiens; identical to SEQ ID NO: 17005

SEQ ID NO: 20812 - DNA, 201 bp, Homo sapiens; identical to SEQ ID NO: 17006

SEQ ID NO: 20813 - DNA, 201 bp, Homo sapiens; identical to SEQ ID NO: 17007

SEQ ID NO: 20814 - DNA, 201 bp, Homo sapiens; identical to SEQ ID NO: 17387

SEQ ID NO: 20815 - DNA, 201 bp, Homo sapiens; identical to SEQ ID NO: 17494

SEQ ID NO: 20816 - DNA, 201 bp, Homo sapiens; identical to SEQ ID NO: 17495

SEQ ID NO: 20817 - DNA, 201 bp, Homo sapiens; identical to SEQ ID NO: 17526

SEQ ID NO: 20818 - DNA, 201 bp, Homo sapiens; identical to SEQ ID NO: 17527

SEQ ID NO: 20819 - DNA, 201 bp, Homo sapiens
cacatggagttgacacttttaagcttacaaaaaaaaaatgaccaagtcaaaatatgatgataataacagttgtgattaactaacctaagcccccaaatctrtcattctgaagccctgaatacctttcgttaatacattcccttttctgcttaagcctttttgagtttcctgtcacttattactgacacagactccctgaga

SEQ ID NO: 20820 - DNA, 201 bp, Homo sapiens
gtgatttgagccattaagctaattgggtcatattgtagaattctctctctagatcacattcactttctttcagttgatatgttctaatgcctggaaggtcrcctttgacatcctaatcacaaagttaaaggccttttcctgtttctcctgctctttgattcttctgcagccaatgggctattggccactgttcattcttga

SEQ ID NO: 20821 - DNA, 201 bp, Homo sapiens
ttgttttcctgaggtattagcattcccttccatgatctctgatagtagtaacatttatcagcttaagatttaccaagaatctgtatgattttagtgatttragccattaagctaattgggtcatattgtagaattctctctctagatcacattcactttctttcagttgatatgttctaatgcctggaaggtcacctttga

SEQ ID NO: 20822 - DNA, 201 bp, Homo sapiens
cagcaacatgtcttctctgaaagataaaacagtattatccacatttcatttggtaaattaaatccctttgagcttatttaccatcttgaagatagtgctaktctctgtgagcagaagtttcaaagtgagattatgctaataactcatccttgtgtctcattggcttagcacacagggatgactagtgacatggtatctgca

SEQ ID NO: 20823 - DNA, 201 bp, Homo sapiens
gcaaaacaatcttttgctgcaacgcccccacaaaagcctgcatgaaagggtcacacaagtatgtacaaaggaaagatcagtgaagatttcctttcttctcyctccgttttttttccttttagcgctgagctatgaacatgcttaaaagtccgagtgatgagatcaattctgaatggtccttgttcttcaggataagttcaa

SEQ ID NO: 20824 - DNA, 201 bp, Homo sapiens
tttgtaaatcttgtctctccaacttgattgtttacctcttcttttaaaaggggcaagcctatcctctttgtatctcacaaagcatttaagagtaacttgtwcaatgtattaactttttgtccaaataattttagaaatgtttacctccaatagttaggaactattcacatcgctttgtattctttcagttaatatgtcttc

SEQ ID NO: 20825 - DNA, 201 bp, Homo sapiens
ccaaatgggaccaaggtcagatctcacttctttagtaatgatgttcctcattctctaagttgaactaatcgctcctttcaaaaaagtttccacaattcgtrttcagataatacatttggtaattaaccacttactgcctactgacatcttttccattattgcttgctactattaagtgctttattgttatttaagttttca

SEQ ID NO: 20826 - DNA, 201 bp, Homo sapiens
ttggtaattaaccacttactgcctactgacatcttttccattattgcttgctactattaagtgctttattgttatttaagttttcatatttgtaaatcttrtctctccaacttgattgtttacctcttcttttaaaaggggcaagcctatcctctttgtatctcacaaagcatttaagagtaacttgtacaatgtattaac

SEQ ID NO: 20827 - DNA, 201 bp, Homo sapiens
attacactattttattgtctgacatgatgctgtgttttcctggttcccttcccacctcttgacagcttgtttctttttcttcattagctccttctttatcyaccttttaaaaatgagaaattatttagttcaatccttggctctggctttcctaggatataccctctcctcttatttccaacatctcctccatgcagatga

SEQ ID NO: 20828 - DNA, 201 bp, Homo sapiens
cactgttattttcatctagtattattttaaatattcaagtgttttgaaaataaatgaatgtgatatgttcattgacctatttgtaagaagctagatatccrcaaattgtgaaatacagtcaactagcaattatcctcatacagatccaggctttaccttatgactagtgatctgtggtctgttgccaaccagctctcttct

SEQ ID NO: 20829 - DNA, 201 bp, Homo sapiens
attgaccttgagtaacttgaggaaacagtagagtctatgatttgcttcatctgaggttgatattttttccaactacaaatagtagcttcccgcttccccargatcagactcagagggtgccttaaacgtcaatgctgaactactcatttcagctccaggaaaataagtctgttgtgtctcaaaagaattgttctctgaggc

SEQ ID NO: 20830 - DNA, 201 bp, Homo sapiens
cgctgagctatgaacatgcttaaaagtccgagtgatgagatcaattctgaatggtccttgttcttcaggataagttcaaaggtatcaaaagtcagcctttwaggctgaaggaaaaatgctttctactttgccgccaaaagagtttgaagtctgggggcttcatagaaattccaaggtgagaaccagaagggaagtcataga

SEQ ID NO: 20831 - DNA, 201 bp, Homo sapiens
gtagagtctatgatttgcttcatctgaggttgatattttttccaactacaaatagtagcttcccgcttccccaggatcagactcagagggtgccttaaacrtcaatgctgaactactcatttcagctccaggaaaataagtctgttgtgtctcaaaagaattgttctctgaggcaaaacaatcttttgctgcaacgccccc

SEQ ID NO: 20832 - DNA, 201 bp, Homo sapiens
caggatcagactcagagggtgccttaaacgtcaatgctgaactactcatttcagctccaggaaaataagtctgttgtgtctcaaaagaattgttctctgargcaaaacaatcttttgctgcaacgcccccacaaaagcctgcatgaaagggtcacacaagtatgtacaaaggaaagatcagtgaagatttcctttcttctc

SEQ ID NO: 20833 - DNA, 201 bp, Homo sapiens
cagctcaacccaccaagttgccccttcttgcattatttatggatatttatggaggattcaataattgcaacatgtgctatgggagtgttgcaatgcattgkcaacaagttcttagcttttagttaagacaatcaattccaaggagttttcatggagctagtcaagatagaaaggcaatgactaaggtcaaaacccacagtg

SEQ ID NO: 20834 - DNA, 201 bp, Homo sapiens
gctcaggagttcaaggcaagcctgggcaacactacaaaaccccatctctgctaaaactacaaaaaattagccgggtgtggtggagtgcacctgtagtcccwgttacccaggaggctgaaaccagagaattgcctgaacccaggagatggaggttgcagtgagctgagattgtgccactgcattccagcctgggtgacagag

SEQ ID NO: 20835 - DNA, 201 bp, Homo sapiens
gcacaggggatcacaggagaatgatagaagtgatatgcccttttccataggggaggaaggagatgggaagtgtagacatttcttttaaggagcagtaagtmattagggaaaaataatgcacctgggaggtgggaggcagacattatgggaaggtgaggggtggaactgcacaggaacaaaggtcatcttattatgcaaatt

SEQ ID NO: 20836 - DNA, 201 bp, Homo sapiens
ataagaattttcttccccctaccccacacagatcttactcaataaaattgtttttaaaaatgtgggcttgattactcactgttattttcatctagtattawtttaaatattcaagtgttttgaaaataaatgaatgtgatatgttcattgacctatttgtaagaagctagatatccgcaaattgtgaaatacagtcaacta

SEQ ID NO: 20837 - DNA, 201 bp, Homo sapiens
accaagccttgttgattcttatttcacagtgctggttatattcctactgacaacaagctaaatcggactcttttacctttcctaggattgctgaaaaggcyccttaatggtttcctcaatttcaacatcagttacctccattctataccccacatctatgtcaaactacctctccccaaaacactgtcagaccatgccact

SEQ ID NO: 20838 - DNA, 201 bp, Homo sapiens
ttcccagtgtagcagtgttaggaggtgaggcataatgagaggtgtttcagtcataggggtggatccctcatgaatagattaatgccttccctggggttggygggggttgggggtggtgaatgagtttccactctattagtttccacaagaattggttgttaaaaaggagctggcacctcctctctccctctcacttcctct

SEQ ID NO: 20839 - DNA, 201 bp, Homo sapiens
ttcttctgcagccaatgggctattggccactgttcattcttgaaattacactattttattgtctgacatgatgctgtgttttcctggttcccttcccacckcttgacagcttgtttctttttcttcattagctccttctttatctaccttttaaaaatgagaaattatttagttcaatccttggctctggctttcctagga

SEQ ID NO: 20840 - DNA, 201 bp, Homo sapiens
acaacttaaatgtttggtacaacatggagtaaatagctgaagatttgattgagtttttcatttttcatccaggtgttcagatgcagaatgaacgtaagaaygatgaagtggatgggcagatttccaaggcagctggaagtaaattggacaactgcatgacccaaagatgtaaagccaaaatttcacattcaaagcaagtca

SEQ ID NO: 20841 - DNA, 201 bp, Homo sapiens
caaggcacgtcttacatggcggcaggagagacagcgtgtacaggggaaactgccacttttaaatcattgctcactaacacaagaacagcatgggggaaacmgcccccatgatccaatcactcctaccaggtccctccctcaacacatggggattataattcgagatgagatttgggtggggacacagagccaaaccatatc

SEQ ID NO: 20842 - DNA, 201 bp, Homo sapiens
ctagatctaaattctagagcctagaataatataaaattctacaagacaacatgacaaaatctttacgaccttggaataagcagatttctttggtaggatgyaaaacatgcaaaccattttaaaaactgataaattgaattttattaaaatttaaaatgtctccccttcaaaagacaccactaaaaaaataaaaggcaaacc

SEQ ID NO: 20843 - DNA, 201 bp, Homo sapiens
caaatccactaggatagctaaaataagaaagacgactgtattagtccattctcacactgctataaagagactacctgagactgggtagtttataaatgaargaggtttaattgactcactgttctgcatggcaggggaggcctcaggaagcttacagtcacagtagaaggtgaaggagaagcaaggcacgtcttacatggc

SEQ ID NO: 20844 - DNA, 201 bp, Homo sapiens
actggctatataatctcagaagcaatatttaactttccaaaactcagtttcctcaactccaaaacacagaattgtgctgtgaaccaaatgtgttaaagtgytaagtacagtgcctagaatatagagggtgtttacttttatcagcgttgcattaatattaccaacatcgttgaaacaaagactatgcatatggtataaatt

SEQ ID NO: 20845 - DNA, 201 bp, Homo sapiens
agacaaagctttataaggaccttctttgactcctatcaactgcaaaaacaatatctaataaaaaacataagaaatggctgtgtgggtgatatttatgctgrtgttaggaaagctcataccccggcagtagaaaacatagcaattcaaaagcacatgttctgggaagtgactgctagctgggtctgttttttgctttacatc

SEQ ID NO: 20846 - DNA, 201 bp, Homo sapiens
gctggctggagcagctggcaaaacatgatctaggactgctaaaactgttctgacaaaagcactttagtggggtctgcaggacagggtctgaaagatgtcaraatttttaaaaggtactaattgctcaaaggatgaagcaatccctctgaaaactaacccagcattttaatagaacccagaacaatactgagaatctcagag

SEQ ID NO: 20847 - DNA, 201 bp, Homo sapiens
atctattaaaaataaatgggcaaataatttgaaaagaaggtctccaaagatgtggagacctttggtgaaaggtcaccaaagatgtgtaaatgacctatacrcccatgaaaagacgctcaacatcatagtcattagggaaatgagaactgaaatcataatgaaataccactacaaatccactaggatagctaaaataagaaa

SEQ ID NO: 20848 - DNA, 201 bp, Homo sapiens
tttcaggcacctatgaatccttcaagaactgtacccaaaactttagcaattgagcaagaaacaaaagagcagaagcctattaccaaatcactgttggaaakaaggctatttggcctctgcaaacctctgatgtctgtcagttcaatccttccaacagctcttgcagaggtccgccaggaagacagtgaggggactgtggcc

SEQ ID NO: 20849 - DNA, 201 bp, Homo sapiens
caaaaaaaaaatgaccaagtcaaaatatgatgataataacagttgtgattaactaacctaagcccccaaatctatcattctgaagccctgaatacctttcrttaatacattcccttttctgcttaagcctttttgagtttcctgtcacttattactgacacagactccctgagacaaagctttataaggaccttctttgac

SEQ ID NO: 20850 - DNA, 201 bp, Homo sapiens
atgaagttggcaccattagagaaggtatggttgcttagctgtatctgtgcctaaagtgaacatgtgtactcttagtcacacccagtttctacttccacttyttgtggaaacagtccccatcttcatttagaaatccattcatctcctattttcagtctacatggttccagggagatgaccataacacaagctcattgtgac

SEQ ID NO: 20851 - DNA, 201 bp, Homo sapiens
tttactaagtcatggcagatatagcctgctatgaagttggcaccattagagaaggtatggttgcttagctgtatctgtgcctaaagtgaacatgtgtactyttagtcacacccagtttctacttccacttcttgtggaaacagtccccatcttcatttagaaatccattcatctcctattttcagtctacatggttccagg

SEQ ID NO: 20852 - DNA, 201 bp, Homo sapiens
gcacatcacagcaacagtctttggggcatcactttctgggccccaacattctcaaaggcaaagattctgttttattcatctctacacatcttcctctcttycccttttactaagtcatggcagatatagcctgctatgaagttggcaccattagagaaggtatggttgcttagctgtatctgtgcctaaagtgaacatgtg

SEQ ID NO: 20853 - DNA, 201 bp, Homo sapiens
cacaaaattttattgtaatgtgcatagcacaggggatcacaggagaatgatagaagtgatatgcccttttccataggggaggaaggagatgggaagtgtasacatttcttttaaggagcagtaagtcattagggaaaaataatgcacctgggaggtgggaggcagacattatgggaaggtgaggggtggaactgcacagga

SEQ ID NO: 20854 - DNA, 201 bp, Homo sapiens
aaaaggcacacaaaattttattgtaatgtgcatagcacaggggatcacaggagaatgatagaagtgatatgcccttttccataggggaggaaggagatggraagtgtagacatttcttttaaggagcagtaagtcattagggaaaaataatgcacctgggaggtgggaggcagacattatgggaaggtgaggggtggaact

SEQ ID NO: 20855 - DNA, 201 bp, Homo sapiens
atcggactcttttacctttcctaggattgctgaaaaggccccttaatggtttcctcaatttcaacatcagttacctccattctataccccacatctatgtsaaactacctctccccaaaacactgtcagaccatgccactctgccaatcagaagccttccaggactcctcattgcttactggactgtatctaaaaccttca

SEQ ID NO: 20856 - DNA, 201 bp, Homo sapiens
agctaaatcggactcttttacctttcctaggattgctgaaaaggccccttaatggtttcctcaatttcaacatcagttacctccattctataccccacatmtatgtcaaactacctctccccaaaacactgtcagaccatgccactctgccaatcagaagccttccaggactcctcattgcttactggactgtatctaaaa

SEQ ID NO: 20857 - DNA, 201 bp, Homo sapiens
cctcctctctccctctcacttcctcttgccatgtaatctttacaggagctggctccccttcaccttttgccatgagtggaaacttctgagatcttcaccaraagacaaccacagtttggtgtcatgcttcttgtatagtctgcaaaacaatgagctaaataaactcttttcctttataaattacccagcctcaggtattcc

SEQ ID NO: 20858 - DNA, 201 bp, Homo sapiens
ttggtgggggttgggggtggtgaatgagtttccactctattagtttccacaagaattggttgttaaaaaggagctggcacctcctctctccctctcacttyctcttgccatgtaatctttacaggagctggctccccttcaccttttgccatgagtggaaacttctgagatcttcaccagaagacaaccacagtttggtgt

SEQ ID NO: 20859 - DNA, 201 bp, Homo sapiens
aatttcattcccagtgtagcagtgttaggaggtgaggcataatgagaggtgtttcagtcataggggtggatccctcatgaatagattaatgccttccctgkggttggtgggggttgggggtggtgaatgagtttccactctattagtttccacaagaattggttgttaaaaaggagctggcacctcctctctccctctcac

SEQ ID NO: 20860 - DNA, 201 bp, Homo sapiens
gttcccttcccacctcttgacagcttgtttctttttcttcattagctccttctttatctaccttttaaaaatgagaaattatttagttcaatccttggctstggctttcctaggatataccctctcctcttatttccaacatctcctccatgcagatgactcctgaaactccacccaaaacctcattggcaatcaacacag

SEQ ID NO: 20861 - DNA, 201 bp, Homo sapiens
tttctcctgctctttgattcttctgcagccaatgggctattggccactgttcattcttgaaattacactattttattgtctgacatgatgctgtgttttcstggttcccttcccacctcttgacagcttgtttctttttcttcattagctccttctttatctaccttttaaaaatgagaaattatttagttcaatccttgg

SEQ ID NO: 20862 - DNA, 201 bp, Homo sapiens
agtcaggttgatgttggtttgaatactaactccgttgtttactggctatataatctcagaagcaatatttaactttccaaaactcagtttcctcaactccwaaacacagaattgtgctgtgaaccaaatgtgttaaagtgctaagtacagtgcctagaatatagagggtgtttacttttatcagcgttgcattaatattac

SEQ ID NO: 20863 - DNA, 201 bp, Homo sapiens
gttagtaatccatgctgtaaggaaatcaggagagtagttactgctgggaggggtcccaactggacggaagcacagttgcatacctaggtgcactaatgttstgtctcctaacctgggtgcacaggttatgttcagtttgaaactgaactggtatgttcagtttgaaacttcatggagctgtatacctatgacatatacact

SEQ ID NO: 20864 - DNA, 201 bp, Homo sapiens
gtttggtacaacatggagtaaatagctgaagatttgattgagtttttcatttttcatccaggtgttcagatgcagaatgaacgtaagaacgatgaagtggrtgggcagatttccaaggcagctggaagtaaattggacaactgcatgacccaaagatgtaaagccaaaatttcacattcaaagcaagtcaggaggtaaaac

SEQ ID NO: 20865 - DNA, 201 bp, Homo sapiens
catgaaaagacgctcaacatcatagtcattagggaaatgagaactgaaatcataatgaaataccactacaaatccactaggatagctaaaataagaaagaygactgtattagtccattctcacactgctataaagagactacctgagactgggtagtttataaatgaaagaggtttaattgactcactgttctgcatggca

SEQ ID NO: 20866 - DNA, 201 bp, Homo sapiens
atcttcatcccatccaacatcttgcaaggggacacccattttttggtaaaaacaatttttaaaattgttctgatccgtcaaacaaaaatgttgtccacatmaacaggctgtttcaaattgatcacgtgaaagagatttgtttcttcctggccttgcccaggataaagttgtgtcttctgatttttaatctgccaaatatcc

SEQ ID NO: 20867 - DNA, 201 bp, Homo sapiens
tttaatctgccaaatatccaaaagcagactaaaaatttgtcaatgctccaaatatttagaacaacttaaatgtttggtacaacatggagtaaatagctgargatttgattgagtttttcatttttcatccaggtgttcagatgcagaatgaacgtaagaatgatgaagtggatgggcagatttccaaggcagctggaagta

SEQ ID NO: 20868 - DNA, 201 bp, Homo sapiens
tattttcttcctcataactcctgtcaaagctttattttgtcccctcccacaaaatctggacccatggcaggatgaagtcctcttgtcctgccactctgtgygaggagcagtgtctctgaggtgccaaggccagaagatgccattttggtcctatagacaaaaccaagaggtttgagtggatcaaaattgtctaattaagtc

SEQ ID NO: 20869 - DNA, 201 bp, Homo sapiens
tcctccatgcagatgactcctgaaactccacccaaaacctcattggcaatcaacacagcaaagcaatgaacattttacttgatcactgaaccttcaccaawacctcaacatctctaggtataagtttctcatctgagctcaaaactgtctttctctacagattcctccattattccagtcttttaggactgaaatctcaac

SEQ ID NO: 20870 - DNA, 201 bp, Homo sapiens
gtttgactttttttgtcgacacctattttatcaacagaactaggaacttgaagatgaataaataactcaatatctaacatacacaaatacatcacagtagratccttggctcttgatccccattgccaatggcattttcaataagaacagaggaactaaattaagcaaagaaagatggttccagtatagccattctattct

SEQ ID NO: 20871 - DNA, 201 bp, Homo sapiens
gaagggaagtttggcagctgagtcacctgtcaggatagtgtgttgcaggaaatctccaaatcaaggagagacgccttcccaaggagaggtggagctggacygggcagctgtgggaaaagttggtttctagccacaggctttttctgtaggtaaatcaaaccagcctagttttccaatctaggcacagagcaggcactccag

SEQ ID NO: 20872 - DNA, 201 bp, Homo sapiens; identical to SEQ ID NO: 2844

SEQ ID NO: 20873 - DNA, 201 bp, Homo sapiens; identical to SEQ ID NO: 7246

SEQ ID NO: 20874 - DNA, 201 bp, Homo sapiens; identical to SEQ ID NO: 20387

SEQ ID NO: 20875 - DNA, 201 bp, Homo sapiens; identical to SEQ ID NO: 20320

SEQ ID NO: 20876 - DNA, 201 bp, Homo sapiens; identical to SEQ ID NO: 20321

SEQ ID NO: 20877 - DNA, 201 bp, Homo sapiens; identical to SEQ ID NO: 20322

SEQ ID NO: 20878 - DNA, 201 bp, Homo sapiens; identical to SEQ ID NO: 20323

SEQ ID NO: 20879 - DNA, 201 bp, Homo sapiens; identical to SEQ ID NO: 20324

SEQ ID NO: 20880 - DNA, 201 bp, Homo sapiens; identical to SEQ ID NO: 20325

SEQ ID NO: 20881 - DNA, 201 bp, Homo sapiens; identical to SEQ ID NO: 20326

SEQ ID NO: 20882 - DNA, 201 bp, Homo sapiens
atctgggatgggggaaatagggaagtcacaggaagacttattgggaagcagaatgtcacagaagtgatggaaatcattccctaccactaagcaaggccctkcaatgcacattccagaggctgtcatttacactgcagtctatgtgaaaggccatccctggagcacaaccccaaagtgaataaacaggccccccctgaaatt

SEQ ID NO: 20883 - DNA, 201 bp, Homo sapiens
aatctgggatgggggaaatagggaagtcacaggaagacttattgggaagcagaatgtcacagaagtgatggaaatcattccctaccactaagcaaggccckgcaatgcacattccagaggctgtcatttacactgcagtctatgtgaaaggccatccctggagcacaaccccaaagtgaataaacaggccccccctgaaat

SEQ ID NO: 20884 - DNA, 201 bp, Homo sapiens; identical to SEQ ID NO: 20394

SEQ ID NO: 20885 - DNA, 201 bp, Homo sapiens; identical to SEQ ID NO: 20395

SEQ ID NO: 20886 - DNA, 201 bp, Homo sapiens; identical to SEQ ID NO: 20396

SEQ ID NO: 20887 - DNA, 201 bp, Homo sapiens; identical to SEQ ID NO: 20397

SEQ ID NO: 20888 - DNA, 201 bp, Homo sapiens; identical to SEQ ID NO: 20398

SEQ ID NO: 20889 - DNA, 201 bp, Homo sapiens; identical to SEQ ID NO: 20399

SEQ ID NO: 20890 - DNA, 201 bp, Homo sapiens; identical to SEQ ID NO: 20400

SEQ ID NO: 20891 - DNA, 201 bp, Homo sapiens; identical to SEQ ID NO: 20401

SEQ ID NO: 20892 - DNA, 201 bp, Homo sapiens; identical to SEQ ID NO: 20402

SEQ ID NO: 20893 - DNA, 201 bp, Homo sapiens; identical to SEQ ID NO: 20403

SEQ ID NO: 20894 - DNA, 201 bp, Homo sapiens; identical to SEQ ID NO: 20404

SEQ ID NO: 20895 - DNA, 201 bp, Homo sapiens; identical to SEQ ID NO: 20405

SEQ ID NO: 20896 - DNA, 201 bp, Homo sapiens; identical to SEQ ID NO: 20406

SEQ ID NO: 20897 - DNA, 201 bp, Homo sapiens; identical to SEQ ID NO: 20407

SEQ ID NO: 20898 - DNA, 201 bp, Homo sapiens; identical to SEQ ID NO: 20408

SEQ ID NO: 20899 - DNA, 201 bp, Homo sapiens; identical to SEQ ID NO: 20411

SEQ ID NO: 20900 - DNA, 201 bp, Homo sapiens; identical to SEQ ID NO: 2842

SEQ ID NO: 20901 - DNA, 201 bp, Homo sapiens; identical to SEQ ID NO: 2860

SEQ ID NO: 20902 - DNA, 201 bp, Homo sapiens; identical to SEQ ID NO: 20413

SEQ ID NO: 20903 - DNA, 201 bp, Homo sapiens; identical to SEQ ID NO: 20414

SEQ ID NO: 20904 - DNA, 201 bp, Homo sapiens; identical to SEQ ID NO: 20415

SEQ ID NO: 20905 - DNA, 201 bp, Homo sapiens; identical to SEQ ID NO: 20416

SEQ ID NO: 20906 - DNA, 201 bp, Homo sapiens; identical to SEQ ID NO: 20417

SEQ ID NO: 20907 - DNA, 201 bp, Homo sapiens; identical to SEQ ID NO: 20418

SEQ ID NO: 20908 - DNA, 201 bp, Homo sapiens; identical to SEQ ID NO: 20419

SEQ ID NO: 20909 - DNA, 201 bp, Homo sapiens; identical to SEQ ID NO: 20420

SEQ ID NO: 20910 - DNA, 201 bp, Homo sapiens; identical to SEQ ID NO: 20421

SEQ ID NO: 20911 - DNA, 201 bp, Homo sapiens; identical to SEQ ID NO: 20427

SEQ ID NO: 20912 - DNA, 201 bp, Homo sapiens; identical to SEQ ID NO: 20438

SEQ ID NO: 20913 - DNA, 201 bp, Homo sapiens; identical to SEQ ID NO: 20439

SEQ ID NO: 20914 - DNA, 201 bp, Homo sapiens; identical to SEQ ID NO: 20466

SEQ ID NO: 20915 - DNA, 201 bp, Homo sapiens; identical to SEQ ID NO: 20469

SEQ ID NO: 20916 - DNA, 201 bp, Homo sapiens; identical to SEQ ID NO: 20470

SEQ ID NO: 20917 - DNA, 201 bp, Homo sapiens; identical to SEQ ID NO: 20329

SEQ ID NO: 20918 - DNA, 201 bp, Homo sapiens; identical to SEQ ID NO: 7257

SEQ ID NO: 20919 - DNA, 201 bp, Homo sapiens; identical to SEQ ID NO: 7258

SEQ ID NO: 20920 - DNA, 201 bp, Homo sapiens; identical to SEQ ID NO: 7259

SEQ ID NO: 20921 - DNA, 201 bp, Homo sapiens; identical to SEQ ID NO: 7260

SEQ ID NO: 20922 - DNA, 201 bp, Homo sapiens; identical to SEQ ID NO: 20472

SEQ ID NO: 20923 - DNA, 201 bp, Homo sapiens; identical to SEQ ID NO: 20473

SEQ ID NO: 20924 - DNA, 201 bp, Homo sapiens; identical to SEQ ID NO: 20474

SEQ ID NO: 20925 - DNA, 201 bp, Homo sapiens; identical to SEQ ID NO: 7263

SEQ ID NO: 20926 - DNA, 201 bp, Homo sapiens; identical to SEQ ID NO: 7264

SEQ ID NO: 20927 - DNA, 201 bp, Homo sapiens; identical to SEQ ID NO: 7265

SEQ ID NO: 20928 - DNA, 201 bp, Homo sapiens; identical to SEQ ID NO: 7266

SEQ ID NO: 20929 - DNA, 201 bp, Homo sapiens; identical to SEQ ID NO: 7267

SEQ ID NO: 20930 - DNA, 201 bp, Homo sapiens; identical to SEQ ID NO: 20344

SEQ ID NO: 20931 - DNA, 201 bp, Homo sapiens; identical to SEQ ID NO: 20345

SEQ ID NO: 20932 - DNA, 201 bp, Homo sapiens; identical to SEQ ID NO: 20346

SEQ ID NO: 20933 - DNA, 201 bp, Homo sapiens; identical to SEQ ID NO: 2840

SEQ ID NO: 20934 - DNA, 201 bp, Homo sapiens; identical to SEQ ID NO: 20517

SEQ ID NO: 20935 - DNA, 201 bp, Homo sapiens; identical to SEQ ID NO: 20518

SEQ ID NO: 20936 - DNA, 201 bp, Homo sapiens; identical to SEQ ID NO: 20524

SEQ ID NO: 20937 - DNA, 201 bp, Homo sapiens; identical to SEQ ID NO: 20545

SEQ ID NO: 20938 - DNA, 201 bp, Homo sapiens; identical to SEQ ID NO: 20546

SEQ ID NO: 20939 - DNA, 201 bp, Homo sapiens; identical to SEQ ID NO: 20547

SEQ ID NO: 20940 - DNA, 201 bp, Homo sapiens; identical to SEQ ID NO: 7270

SEQ ID NO: 20941 - DNA, 201 bp, Homo sapiens; identical to SEQ ID NO: 7271

SEQ ID NO: 20942 - DNA, 201 bp, Homo sapiens; identical to SEQ ID NO: 20553

SEQ ID NO: 20943 - DNA, 201 bp, Homo sapiens; identical to SEQ ID NO: 20554

SEQ ID NO: 20944 - DNA, 201 bp, Homo sapiens; identical to SEQ ID NO: 7274

SEQ ID NO: 20945 - DNA, 201 bp, Homo sapiens; identical to SEQ ID NO: 20563

SEQ ID NO: 20946 - DNA, 201 bp, Homo sapiens; identical to SEQ ID NO: 7276

SEQ ID NO: 20947 - DNA, 201 bp, Homo sapiens; identical to SEQ ID NO: 20357

SEQ ID NO: 20948 - DNA, 201 bp, Homo sapiens; identical to SEQ ID NO: 20567

SEQ ID NO: 20949 - DNA, 201 bp, Homo sapiens; identical to SEQ ID NO: 20579

SEQ ID NO: 20950 - DNA, 201 bp, Homo sapiens; identical to SEQ ID NO: 20580

SEQ ID NO: 20951 - DNA, 201 bp, Homo sapiens; identical to SEQ ID NO: 20584

SEQ ID NO: 20952 - DNA, 201 bp, Homo sapiens; identical to SEQ ID NO: 20365

SEQ ID NO: 20953 - DNA, 201 bp, Homo sapiens; identical to SEQ ID NO: 20366

SEQ ID NO: 20954 - DNA, 201 bp, Homo sapiens; identical to SEQ ID NO: 20610

SEQ ID NO: 20955 - DNA, 201 bp, Homo sapiens; identical to SEQ ID NO: 20611

SEQ ID NO: 20956 - DNA, 201 bp, Homo sapiens; identical to SEQ ID NO: 20612

SEQ ID NO: 20957 - DNA, 201 bp, Homo sapiens; identical to SEQ ID NO: 20613

SEQ ID NO: 20958 - DNA, 201 bp, Homo sapiens; identical to SEQ ID NO: 20614

SEQ ID NO: 20959 - DNA, 201 bp, Homo sapiens; identical to SEQ ID NO: 20615

SEQ ID NO: 20960 - DNA, 201 bp, Homo sapiens; identical to SEQ ID NO: 20619

SEQ ID NO: 20961 - DNA, 201 bp, Homo sapiens; identical to SEQ ID NO: 20620

SEQ ID NO: 20962 - DNA, 201 bp, Homo sapiens; identical to SEQ ID NO: 20633

SEQ ID NO: 20963 - DNA, 201 bp, Homo sapiens; identical to SEQ ID NO: 20634

SEQ ID NO: 20964 - DNA, 201 bp, Homo sapiens; identical to SEQ ID NO: 20635

SEQ ID NO: 20965 - DNA, 201 bp, Homo sapiens; identical to SEQ ID NO: 20636

SEQ ID NO: 20966 - DNA, 201 bp, Homo sapiens; identical to SEQ ID NO: 20637

SEQ ID NO: 20967 - DNA, 201 bp, Homo sapiens; identical to SEQ ID NO: 20638

SEQ ID NO: 20968 - DNA, 201 bp, Homo sapiens; identical to SEQ ID NO: 20367

SEQ ID NO: 20969 - DNA, 201 bp, Homo sapiens; identical to SEQ ID NO: 20368

SEQ ID NO: 20970 - DNA, 201 bp, Homo sapiens; identical to SEQ ID NO: 7289

SEQ ID NO: 20971 - DNA, 201 bp, Homo sapiens; identical to SEQ ID NO: 7290

SEQ ID NO: 20972 - DNA, 201 bp, Homo sapiens; identical to SEQ ID NO: 7291

SEQ ID NO: 20973 - DNA, 201 bp, Homo sapiens; identical to SEQ ID NO: 2854

SEQ ID NO: 20974 - DNA, 100 bp, Homo sapiens; identical to SEQ ID NO: 20375

SEQ ID NO: 20975 - DNA, 100 bp, Homo sapiens; identical to SEQ ID NO: 20639

SEQ ID NO: 20976 - DNA, 201 bp, Homo sapiens; identical to SEQ ID NO: 20376

SEQ ID NO: 20977 - DNA, 201 bp, Homo sapiens; identical to SEQ ID NO: 2853

SEQ ID NO: 20978 - DNA, 201 bp, Homo sapiens; identical to SEQ ID NO: 20640

SEQ ID NO: 20979 - DNA, 201 bp, Homo sapiens; identical to SEQ ID NO: 7300

SEQ ID NO: 20980 - DNA, 201 bp, Homo sapiens; identical to SEQ ID NO: 2844

SEQ ID NO: 20981 - DNA, 201 bp, Homo sapiens; identical to SEQ ID NO: 7246

SEQ ID NO: 20982 - DNA, 201 bp, Homo sapiens; identical to SEQ ID NO: 7249

SEQ ID NO: 20983 - DNA, 201 bp, Homo sapiens; identical to SEQ ID NO: 20320

SEQ ID NO: 20984 - DNA, 201 bp, Homo sapiens; identical to SEQ ID NO: 20321

SEQ ID NO: 20985 - DNA, 201 bp, Homo sapiens; identical to SEQ ID NO: 20322

SEQ ID NO: 20986 - DNA, 201 bp, Homo sapiens; identical to SEQ ID NO: 20323

SEQ ID NO: 20987 - DNA, 201 bp, Homo sapiens; identical to SEQ ID NO: 20324

SEQ ID NO: 20988 - DNA, 201 bp, Homo sapiens; identical to SEQ ID NO: 20325

SEQ ID NO: 20989 - DNA, 201 bp, Homo sapiens; identical to SEQ ID NO: 20326

SEQ ID NO: 20990 - DNA, 201 bp, Homo sapiens; identical to SEQ ID NO: 20882

SEQ ID NO: 20991 - DNA, 201 bp, Homo sapiens; identical to SEQ ID NO: 20883

SEQ ID NO: 20992 - DNA, 201 bp, Homo sapiens; identical to SEQ ID NO: 20394

SEQ ID NO: 20993 - DNA, 201 bp, Homo sapiens; identical to SEQ ID NO: 20395

SEQ ID NO: 20994 - DNA, 201 bp, Homo sapiens; identical to SEQ ID NO: 20396

SEQ ID NO: 20995 - DNA, 201 bp, Homo sapiens; identical to SEQ ID NO: 20397

SEQ ID NO: 20996 - DNA, 201 bp, Homo sapiens; identical to SEQ ID NO: 20398

SEQ ID NO: 20997 - DNA, 201 bp, Homo sapiens; identical to SEQ ID NO: 20399

SEQ ID NO: 20998 - DNA, 201 bp, Homo sapiens; identical to SEQ ID NO: 20400

SEQ ID NO: 20999 - DNA, 201 bp, Homo sapiens; identical to SEQ ID NO: 20401

SEQ ID NO: 21000 - DNA, 201 bp, Homo sapiens; identical to SEQ ID NO: 20402

SEQ ID NO: 21001 - DNA, 201 bp, Homo sapiens; identical to SEQ ID NO: 20403

SEQ ID NO: 21002 - DNA, 201 bp, Homo sapiens; identical to SEQ ID NO: 20404

SEQ ID NO: 21003 - DNA, 201 bp, Homo sapiens; identical to SEQ ID NO: 2842

SEQ ID NO: 21004 - DNA, 201 bp, Homo sapiens; identical to SEQ ID NO: 2860

SEQ ID NO: 21005 - DNA, 201 bp, Homo sapiens; identical to SEQ ID NO: 20413

SEQ ID NO: 21006 - DNA, 201 bp, Homo sapiens; identical to SEQ ID NO: 20414

SEQ ID NO: 21007 - DNA, 201 bp, Homo sapiens; identical to SEQ ID NO: 20415

SEQ ID NO: 21008 - DNA, 201 bp, Homo sapiens; identical to SEQ ID NO: 20416

SEQ ID NO: 21009 - DNA, 201 bp, Homo sapiens; identical to SEQ ID NO: 20417

SEQ ID NO: 21010 - DNA, 201 bp, Homo sapiens; identical to SEQ ID NO: 20418

SEQ ID NO: 21011 - DNA, 201 bp, Homo sapiens; identical to SEQ ID NO: 20419

SEQ ID NO: 21012 - DNA, 201 bp, Homo sapiens; identical to SEQ ID NO: 20420

SEQ ID NO: 21013 - DNA, 201 bp, Homo sapiens; identical to SEQ ID NO: 20466

SEQ ID NO: 21014 - DNA, 201 bp, Homo sapiens; identical to SEQ ID NO: 20469

SEQ ID NO: 21015 - DNA, 201 bp, Homo sapiens; identical to SEQ ID NO: 20329

SEQ ID NO: 21016 - DNA, 201 bp, Homo sapiens; identical to SEQ ID NO: 7253

SEQ ID NO: 21017 - DNA, 201 bp, Homo sapiens; identical to SEQ ID NO: 7254

SEQ ID NO: 21018 - DNA, 201 bp, Homo sapiens; identical to SEQ ID NO: 7255

SEQ ID NO: 21019 - DNA, 201 bp, Homo sapiens; identical to SEQ ID NO: 7256

SEQ ID NO: 21020 - DNA, 201 bp, Homo sapiens; identical to SEQ ID NO: 7257

SEQ ID NO: 21021 - DNA, 201 bp, Homo sapiens; identical to SEQ ID NO: 7258

SEQ ID NO: 21022 - DNA, 201 bp, Homo sapiens; identical to SEQ ID NO: 7259

SEQ ID NO: 21023 - DNA, 201 bp, Homo sapiens; identical to SEQ ID NO: 7260

SEQ ID NO: 21024 - DNA, 201 bp, Homo sapiens; identical to SEQ ID NO: 7262

SEQ ID NO: 21025 - DNA, 201 bp, Homo sapiens; identical to SEQ ID NO: 20472

SEQ ID NO: 21026 - DNA, 201 bp, Homo sapiens; identical to SEQ ID NO: 7263

SEQ ID NO: 21027 - DNA, 201 bp, Homo sapiens; identical to SEQ ID NO: 7264

SEQ ID NO: 21028 - DNA, 201 bp, Homo sapiens; identical to SEQ ID NO: 7265

SEQ ID NO: 21029 - DNA, 201 bp, Homo sapiens; identical to SEQ ID NO: 7266

SEQ ID NO: 21030 - DNA, 201 bp, Homo sapiens; identical to SEQ ID NO: 7267

SEQ ID NO: 21031 - DNA, 201 bp, Homo sapiens; identical to SEQ ID NO: 20344

SEQ ID NO: 21032 - DNA, 201 bp, Homo sapiens; identical to SEQ ID NO: 20345

SEQ ID NO: 21033 - DNA, 201 bp, Homo sapiens; identical to SEQ ID NO: 20346

SEQ ID NO: 21034 - DNA, 201 bp, Homo sapiens; identical to SEQ ID NO: 2840

SEQ ID NO: 21035 - DNA, 201 bp, Homo sapiens; identical to SEQ ID NO: 7268

SEQ ID NO: 21036 - DNA, 201 bp, Homo sapiens; identical to SEQ ID NO: 7269

SEQ ID NO: 21037 - DNA, 201 bp, Homo sapiens; identical to SEQ ID NO: 20545

SEQ ID NO: 21038 - DNA, 201 bp, Homo sapiens; identical to SEQ ID NO: 20546

SEQ ID NO: 21039 - DNA, 201 bp, Homo sapiens; identical to SEQ ID NO: 20547

SEQ ID NO: 21040 - DNA, 201 bp, Homo sapiens; identical to SEQ ID NO: 7270

SEQ ID NO: 21041 - DNA, 201 bp, Homo sapiens; identical to SEQ ID NO: 7271

SEQ ID NO: 21042 - DNA, 201 bp, Homo sapiens; identical to SEQ ID NO: 7272

SEQ ID NO: 21043 - DNA, 201 bp, Homo sapiens; identical to SEQ ID NO: 20554

SEQ ID NO: 21044 - DNA, 201 bp, Homo sapiens; identical to SEQ ID NO: 7274

SEQ ID NO: 21045 - DNA, 201 bp, Homo sapiens; identical to SEQ ID NO: 7276

SEQ ID NO: 21046 - DNA, 201 bp, Homo sapiens; identical to SEQ ID NO: 20357

SEQ ID NO: 21047 - DNA, 201 bp, Homo sapiens; identical to SEQ ID NO: 7277

SEQ ID NO: 21048 - DNA, 201 bp, Homo sapiens; identical to SEQ ID NO: 7278

SEQ ID NO: 21049 - DNA, 201 bp, Homo sapiens; identical to SEQ ID NO: 7282

SEQ ID NO: 21050 - DNA, 201 bp, Homo sapiens; identical to SEQ ID NO: 20579

SEQ ID NO: 21051 - DNA, 201 bp, Homo sapiens; identical to SEQ ID NO: 7285

SEQ ID NO: 21052 - DNA, 201 bp, Homo sapiens; identical to SEQ ID NO: 20365

SEQ ID NO: 21053 - DNA, 201 bp, Homo sapiens; identical to SEQ ID NO: 20366

SEQ ID NO: 21054 - DNA, 201 bp, Homo sapiens; identical to SEQ ID NO: 20637

SEQ ID NO: 21055 - DNA, 201 bp, Homo sapiens; identical to SEQ ID NO: 20638

SEQ ID NO: 21056 - DNA, 201 bp, Homo sapiens; identical to SEQ ID NO: 20367

SEQ ID NO: 21057 - DNA, 201 bp, Homo sapiens; identical to SEQ ID NO: 20368

SEQ ID NO: 21058 - DNA, 201 bp, Homo sapiens; identical to SEQ ID NO: 7289

SEQ ID NO: 21059 - DNA, 201 bp, Homo sapiens; identical to SEQ ID NO: 7290

SEQ ID NO: 21060 - DNA, 201 bp, Homo sapiens; identical to SEQ ID NO: 7291

SEQ ID NO: 21061 - DNA, 201 bp, Homo sapiens; identical to SEQ ID NO: 2854

SEQ ID NO: 21062 - DNA, 201 bp, Homo sapiens; identical to SEQ ID NO: 7293

SEQ ID NO: 21063 - DNA, 100 bp, Homo sapiens; identical to SEQ ID NO: 20375

SEQ ID NO: 21064 - DNA, 201 bp, Homo sapiens; identical to SEQ ID NO: 20376

SEQ ID NO: 21065 - DNA, 201 bp, Homo sapiens; identical to SEQ ID NO: 2853

SEQ ID NO: 21066 - DNA, 201 bp, Homo sapiens; identical to SEQ ID NO: 7300

SEQ ID NO: 21067 - DNA, 201 bp, Homo sapiens; identical to SEQ ID NO: 4302

SEQ ID NO: 21068 - DNA, 201 bp, Homo sapiens; identical to SEQ ID NO: 4304

SEQ ID NO: 21069 - DNA, 201 bp, Homo sapiens; identical to SEQ ID NO: 4305

SEQ ID NO: 21070 - DNA, 201 bp, Homo sapiens; identical to SEQ ID NO: 4309

SEQ ID NO: 21071 - DNA, 201 bp, Homo sapiens; identical to SEQ ID NO: 4310

SEQ ID NO: 21072 - DNA, 201 bp, Homo sapiens; identical to SEQ ID NO: 4310

SEQ ID NO: 21073 - DNA, 201 bp, Homo sapiens; identical to SEQ ID NO: 4312

SEQ ID NO: 21074 - DNA, 201 bp, Homo sapiens; identical to SEQ ID NO: 20744

SEQ ID NO: 21075 - DNA, 201 bp, Homo sapiens; identical to SEQ ID NO: 20745

SEQ ID NO: 21076 - DNA, 201 bp, Homo sapiens; identical to SEQ ID NO: 4313

SEQ ID NO: 21077 - DNA, 201 bp, Homo sapiens; identical to SEQ ID NO: 357

SEQ ID NO: 21078 - DNA, 201 bp, Homo sapiens; identical to SEQ ID NO: 358

SEQ ID NO: 21079 - DNA, 201 bp, Homo sapiens; identical to SEQ ID NO: 359

SEQ ID NO: 21080 - DNA, 201 bp, Homo sapiens; identical to SEQ ID NO: 356

SEQ ID NO: 21081 - DNA, 201 bp, Homo sapiens; identical to SEQ ID NO: 4318

SEQ ID NO: 21082 - DNA, 201 bp, Homo sapiens; identical to SEQ ID NO: 4319

SEQ ID NO: 21083 - DNA, 201 bp, Homo sapiens; identical to SEQ ID NO: 4322

SEQ ID NO: 21084 - DNA, 201 bp, Homo sapiens; identical to SEQ ID NO: 4323

SEQ ID NO: 21085 - DNA, 201 bp, Homo sapiens; identical to SEQ ID NO: 4324

SEQ ID NO: 21086 - DNA, 201 bp, Homo sapiens; identical to SEQ ID NO: 4325

SEQ ID NO: 21087 - DNA, 201 bp, Homo sapiens; identical to SEQ ID NO: 4326

SEQ ID NO: 21088 - DNA, 201 bp, Homo sapiens; identical to SEQ ID NO: 20758

SEQ ID NO: 21089 - DNA, 201 bp, Homo sapiens; identical to SEQ ID NO: 361

SEQ ID NO: 21090 - DNA, 201 bp, Homo sapiens; identical to SEQ ID NO: 4330

SEQ ID NO: 21091 - DNA, 201 bp, Homo sapiens; identical to SEQ ID NO: 4330

SEQ ID NO: 21092 - DNA, 201 bp, Homo sapiens; identical to SEQ ID NO: 4332

SEQ ID NO: 21093 - DNA, 201 bp, Homo sapiens; identical to SEQ ID NO: 4332

SEQ ID NO: 21094 - DNA, 201 bp, Homo sapiens; identical to SEQ ID NO: 4334

SEQ ID NO: 21095 - DNA, 201 bp, Homo sapiens; identical to SEQ ID NO: 354

SEQ ID NO: 21096 - DNA, 201 bp, Homo sapiens; identical to SEQ ID NO: 4336

SEQ ID NO: 21097 - DNA, 201 bp, Homo sapiens; identical to SEQ ID NO: 4336

SEQ ID NO: 21098 - DNA, 201 bp, Homo sapiens; identical to SEQ ID NO: 355

SEQ ID NO: 21099 - DNA, 201 bp, Homo sapiens; identical to SEQ ID NO: 4342

SEQ ID NO: 21100 - DNA, 201 bp, Homo sapiens; identical to SEQ ID NO: 4343

SEQ ID NO: 21101 - DNA, 201 bp, Homo sapiens; identical to SEQ ID NO: 4344

SEQ ID NO: 21102 - DNA, 201 bp, Homo sapiens; identical to SEQ ID NO: 4345

SEQ ID NO: 21103 - DNA, 201 bp, Homo sapiens; identical to SEQ ID NO: 4346

SEQ ID NO: 21104 - DNA, 201 bp, Homo sapiens; identical to SEQ ID NO: 4347

SEQ ID NO: 21105 - DNA, 201 bp, Homo sapiens; identical to SEQ ID NO: 4348

SEQ ID NO: 21106 - DNA, 201 bp, Homo sapiens; identical to SEQ ID NO: 363

SEQ ID NO: 21107 - DNA, 201 bp, Homo sapiens; identical to SEQ ID NO: 362

SEQ ID NO: 21108 - DNA, 201 bp, Homo sapiens; identical to SEQ ID NO: 4351

SEQ ID NO: 21109 - DNA, 201 bp, Homo sapiens; identical to SEQ ID NO: 4352

SEQ ID NO: 21110 - DNA, 100 bp, Homo sapiens; identical to SEQ ID NO: 4353

SEQ ID NO: 21111 - DNA, 201 bp, Homo sapiens; identical to SEQ ID NO: 4354

SEQ ID NO: 21112 - DNA, 201 bp, Homo sapiens; identical to SEQ ID NO: 4355
